United States Patent Application Publication US 2019/0183130 A1 - sequence listing, part 3

SEQ ID NO: 1 - DNA, 19352526 bp, Cryptococcus macerans (residues 3,870,507-5,805,759 of 19,352,526)
gcctttcacgccctcaaagcctgcttgccgaccttgcatgcatccgaccggggccaccaagacgtctcttgctgaccatagcacccgcgcttctgcttccctccccacctttgcccgacccgcctgctgttcgccctggcgccgctctctggcctcgctatcgcccaccaccacgaccggaacgcttcccacaccatccgccccgccgtctcatcccgaacctccaatcgggccgtctccatccttctcgtcaccaacgtccattatatggaattagctccgccaaggaccagctcaccaacacctcggtcgccatcaagaagatcatgaagcccttctcaacgccggtactcagcaagcggacataccgcgagctcaagctgctgaagcacatccggcacgagaacgtgcgtagcaactcaactttgtcctgggacagcatctcgctgggttcttcatctgcatggcctcggcaggcgtctgtcggccgtgacattgttgccggcgatgaggatccgcgctcgccgctacgaacgaacgtttgactgacgaaacctctccctgtttctctcgcccccctcagatcatctcgctctccgacatcttcatctcgccgctcgaggacatctactttgtgacggagctgctcggcaccgacctccaccggttgctcacgtcgcggccgctcgacgaccagttcatccagtactttgtctaccagatgctccgcggcctcaagtacgtccactcggccggcgtcatccaccgcgacctcaagccgtccaacattctcgtcaacgagaactgcgacctcaagatctgcgactttggcctcgcccggatccaggatgcccagatgacgggctacgtctcgacgcgctactaccgcgcgcccgagattatgctcacgtggcagcagtacgaccacgcggttgacatctggtcggtcggctgcatcctcgccgagatgattctcggcaagcccatcttccccggcaaggaccgtgcgtcccccatcatgcctgtctgctcgagacccggctcagcactgaccccgccctgcccctctttcagacgtcaaccagttctcgatcatcacggagctcatcggcacgccgccagacgacgtgatcaagacgatctgctctgaaaacgtgcgtcgcagtcgcagtagctcgagggtgcgacgatcgcgctcgctcacctggaagctgtacctctccgctttgccagaccctacgttttgtccagtcgctgccgaagcgcgagcggatcccgttgtcgaagaagttccccaaggcctcgccggcggcggttgacctgctcgagaagatgctcgtttttgacccccggacgcgcatcaccgcggccgaggcgctcgcccacccgtttctcgagccgtatcacgacccgacggacgagccctcggctgaggaggagtttgactggagcttcaacgacgccgaccttccggtcgacacgtggaaggtcatgatgtactcggagagtgcgtcctcgacgcgtcctgctgcgttcttgctaggtgcctcgactgacctttgtcgccctttcccgacctagtcctcgacttccacaagattggcgacgcgtccgagcaggagtcgctcgacctcgctcagtcgcagctcgaccagagcaacgccgatcaggcgtcgcacgagcagcagcagcagcagtcgtcgtgaggagggcccttgccggatcgcctgcgtcggtccccctttctcgccttcgggtgcgagtttcggggcgcgtgtgcagtggtcgagtcggctataggtcgattcgatctgctctacttcccctatccccttctctcccgaggcggtctccgctatcgcagctcggaccgaaggccccgcgtcctcgtcaggcggtgcccgcgaaccgaactctagtcgcaagctagacccgccttgccctgctctctcctcgcctcccctctagatccgctgtagcgatacgacgccgcccaatacccacactcgacttcacaaaaactcacacaccccttgtcccttcgcatccgctcctccgcgcggtgcctccacgccagaccccttgcctgcctgaaacccctgtactaccccccttggacgttcttccttccttcttcctctcccttttttcgcgagcgtccagatacatgcgggcgatctatccagcggtcattctcgcccggagagaggcagccgcgcgagcctcacggggcgtggtcgagggcgcgacctgcgtcctcgtcagcccggtcgagtccgtgacctccagcgagaccgtcgtacgtcgactggtcgagtcgcagaccgagcatccctcggaggtcctcggcagagggaagcgccctggcgagcgcgtccgtctgtccaccgctgctgctgctgccgtcgagcagcgcggccgacgatgagggagggagcaggatgccagccgtccgtgcgctcgccgagccccacgagcgcgacgacgtcccccgtctcgggcgagtgcgcgtcggcgggctctgctgcgtcgcgagcagaagtgaggccgtcagcgtcggcgaggccagcccgccgaggccggcggctgtggctgtcgccgacgagaagtggcggagctggagcgtcggcgagagcggcgaggtcgttccgcctgtcgacgaggcgagagaagtcatcggggccgagccggtcgcgaagaggacgttgctcgggatagagcttgtgtctagcccggtcccgccgaggcctttggtgtcgtccgagtcggggccggccatttctccatcgagaggtttagccgtcgctgagggcgtgaaggcacccgagcggtcgtagaaggcgccctttgcggctgcctcggacagatccacgtattggcgctgttcccataatcggccgtccgacccgcagccgccgaccgcccgaccggcgagccggagtgcgagtccgccggcccatcgaccgacggcgccgacaaatcctgcccctggcacgacgctctcgacgaggtcgcgtaggtcccaatggtcgcgctggaagatgatccggccggcctcgttgaactgaaagacgcttagcatgcgcagttggatgtggaacagcgaggacggcggcggcgccggtcgttttggcagcgcggacgttggacgaccgaggaagggtgttgagggagcggtgggcggctctggctgctggccgtggaggaaggacagggcggggaccagctgcacgtgtagcgtgtggtcgagcagaccgacgacgacgccgtcgaacgaatggctctcagcgatgtcgccgcactcggaccagacgttggcgaccttccagtggccgcttgaatccgacgacgaagccgattggtcagctgctgggcttgatcgaccgagcgaggcacggacgaggtgggcggcccctttcagccagcgcgtcggcgagcagacggccgagagcgacaggcctggaacgcagagcgagctgacgaagcgcgagaggaggaaggcatccgtgatagccggcctcgatgcgaacgagaggagaggattctcgtagactgttgaccaacgagtcagccagttgtggtcagcctgcaggtaacggccggtggtgacgcgacgcggtccggagcaggccgtcggacgcaccagcatcaacctcgtagcaccgctcgacgacggaccggatggcgtcctcggaagggatgcctgtcagatgtgagtcgtcgccgacaccaccatatagggtctgtcggccgacgaggtgcgaggccagagcagggcggaggtcgcgtcagcggcaagcgtcaagcgcgagggggggtcgggcgtggccgagctcctccagcagcgaggccgcacctggtggacctcgatgagagccgggaggaagaaggggtcgcgcgtgccgaatgcttcgtcgggcagcagcatccggacaggcggggcagtggtcgtgattagagggaggctgcttgagaggggatgaccgtcacgaggtgtcgacgctcctgttggctgtctcggcggcgccggcgggccgcccgtagattcggctcgagggcgacgagaaggtgaggtcggacagtcaccagcaacctccaggagcacaccgcccaaaggccgtcgccttcgaccgactccatcttcttgctggcaggccagataaagagcgaatctttcctccgagtcagtcccgtctgctgggtgacgctttcgagtcggctggtcgaccgctcacggcgcttcctgactcgacatcgacctgccctcctctcgtccgtcgctcaagacgagtgagcgcgtatctcgcctcggtcgctatgtcgctggactgcagtcggcatttagacgggccatgctgactctagctctctttcttgtctcgcccagtcttatcgctttcctccccagcttgctcctgcttccgccgtagagccaacctccttgcgccatgccagccccacgggtcgctcagctcctgcttcagcgcaacgcagcgcacgtcgcccggttcgaccggaccaaggccaagccgctcggtctcgcgctcaagacggccgtcgtcacctgtccgagtccctcgccctctttccagcggctggccgaacgctcgcctgccgcaggccgtcgctgacgcttgccccgcccctggctttgattacaggcatggacagtcggatcaacgtcttcgagatgctcggcatccaggatggcgacgttcacgtcattcggaccgccggcggtcggatccaggacggtgcgctcggcagcagcccgaggttcaggttcgctgcgctgcgccaacgctgaccgcatgcctgcgccgtcctccctcagcaattcgcagcctggtcatcagccagacgcagatcggtctggatgaggtcatgctggttcgtatctatcgttttgactcgcctctcgtgttcggctcgctgacgcgctctactccgctcgacagattcagcacaccggtgcgtacgattcacgaccgatggtccacctgtccaaatgtccaaactacgagagcagcgcattgcccctcgtagcttcatactgatactcattctacgcccactccctcagactgtgcggccctgacgttcaccgagatgtcgctccgggccaagctgctcaacaagtcgtcgtcaggcgtccttccccggacggcacctttccagatctcgtcgaccaacttcctcccctttccacccgcgccaacaaagaccggcccgctgaacgccgacgaggcgcgactccaggcgagcgtcaagtgggacgtcgactggctgcgcaacaacccgctctttgaccagcggacgcaggtctcgggctgggtctacgaggttgagacgggccggctgcgcgaggttgatacgagcacgctcgaggtgcgggagcgcgagctcatccagaaggagcatcggcgtattacggcggcggccaaggatggcaagaaggacgcctgtggctgcggaagcaagcactaaaggcagtctagcgctctgtcgagcgtaatggttgtagcacgagcccacttagaaactagatcacgtccaccggcgcttgaggatcgacttggagaaggcgagctggtcgcggctgcgggcaaagtgcgaagctcttgtcaactagccgcagtggcggtgatgccgagagcgcgctcggactaacctgagatgctcggcccggacctccatccagctcgtatcctcgctccagcccgtctcgccgtccttgccgacgacgcggcccttgacatcgatgagctggaccgagttcgagtacttgggcggcagaccccgccggttggcctcctcctggctcatcccgaggtcgcgaccggcgccgtgcagctcgtgcggcgagtgtgggacaagagcgagagcgtgctgtttgtactcggcctctctggcttgaccggcgagaactggaccagcgtcgctgcccgtgctggaggttaatgcgtccacgtcacttgggcgtagtacatggagagaggggaagcaggcgcgtcagtgatgcaagcccgtgacgggagagctgctgccaggaggtcgcacttgtcaccgtcgacgtcgaggaggacgtctgcgagcggaggagggggagggagggcgtcagcagcagggacgaaggagcaggacgggttgacgacttgaacgcacgctcgccgttgaagaagaggttggcaaaacggtgaaacatgacgccctcacgccggaggcccgtcttgtggacgtcggccagcttgtggctgaggatctcggggcggtcctgggacaaagccgagtggccgcacgacgacatgatgaagccgagcaagttggtaaggttgaccgtctgtgggtttcgcgcgcgtgaaacgtcagtctttgcttgatatggaggcaggcagcgcaggcgaggggaggacgaacccagaggaccttccatcggcggtcggggttggaagcgagagctggccttcggcgtggctcttctcatcttccgtagtcggccttgcgtaagcgctcgcaccacttgcgccgccaacgatcctcgccgaagcggagcctgcctgcgagcgtctcgacggcgctgccctcgggctggccgagctcaggaagcgagccccaaaggatgagcgagtcgaagcaatgcgtcttcagagcggcgccgagggtgccggtctaggcgagggcgaggacgagcgcgagtgagaggctttggggcgagagggtcgagaaggatgggaagcgatgagggtgctgcgctcgaggcgaggccgggaggatgccgcttgtcgaggacgagcccgagctgaacgggagggagagcgagagcaagcacgactgcgagaggttacatgggccacgtgcaggcgtaagccgagatgtggagaatcgctcgactgctggtagacctagcagagggaccacaggagctgtagatgagtgactgaggtttcctttgcagggcgcaacgccccgcgcaacgcccgcgaggaggttgaacgagcgagtggggttacaaagcccagataaggctacctttttgggaagcccgagcccgggctgggctattccacaacagacgcgagcccagctcataatcgacctcctccatcgaccttgacctcgcgccgctcaaccgcctcctcgccctcatcagccgtcgtccctccagccagccacaacactctgggagcagctcccgtctaaaactcagcaaagatggtgcgccgctctctctctggtggctgcgatctttggcctggcgcggctgcaggtcgcctgccgctcggcgtccagccgtttcttcccctcgccggcggaccgctgctgatggcatggaccgctgatccccctcccgcaggcccgaaatgaagagaagagccagtcagtcccttgcctggatctgcagcctgctcggcgccttgcttaccttctcgttctacccttctcaggtcgatgctattccggtttcgcgaggcgcaagctgtcgagctcggcgtctcgaccggccgcaacgcccgccggccgcggattgcgtcgacgtgcgactcgctcaaggagtgcgagcgctggcgaggcgagattgtccgcgagatctcgcgcaaggtgtccaagatccaggaccgtgcgtagccgggcttcctttgtcgcgttggcctgccttcggcgaccctcgacctcgaactcagctaaggcctgcttgcccgacccatcctctttgtctgtcctttgcagtcggcctgacggactacgagatccgagacctgaacgacgagatcaacaagctgatgcgcgagaagaaacattgggagcggcaaatcgtcgcgctcggcggcgccaactacacgcgcaatacagcgatgctcgacgaggacggcaagcaggtgccgggcacgcgcggttacaagtacgacttcggccatcgccctcagcgatgagcgccaactgacagcgcttcttcatcttgcggctgccaggtactttggtcgggcaaaggaccttcccggcgtcaaggagctgttcgcgaagaagggtgcgtgctggcctcagtttcccgccgctcgctcgcgtcgctcacactccgagctctgaaccagtcacgcccgagaacgaggaggctgcccggtccgagctcttccagcgctttcagaaccaggggcctgaatactacggcgactttgacgagctgagcggcggcctgctcgacctcgagcgcggggaggagatcaagggttccgtctcgtcaatcagccccgcccaccgactatactgactcgttgtcgctcggctgcttcacagactgggaggcggcctacgctcgactggcatcgacgctcttgctcccatcctcatcaacagccattcccttcccggtcgcctctacctcgactcctgctccgccccttcctgccagcacgtccgacgtccctccatcagcaaagcgggcagcgacgtctgaggccggcgaggatgccgatgccgaaatgaccgacgcagccgtgggggctccggggtcgccgtcgtcaaaaaaggtcaagctctcgtcgtcgtccgatgcggcagatgccgctgcaccgtccgacgccgccgacccagcagcagccaaggctgcggccgcgcaggcggcaggcttcgtggcgctgtctgtccttcggtcggaagacctcgcgccgccggcgatgccaacgaaggacgagatggcgagcttcctcctcaagaggcggaaggacgcgcttctggcggagtacgcctgaggacgcgggcgtgtcttgtatgacctgactgtatccgcgccatcggctggtcctggcatcaacaaaggttgccgctgctaaaccgactcgaacaggggtgcatggtctggctctacacgcgctgatccacgccctccgtatcgctaacgctgccactgccctcctcgacgagtgcccctcgcccgccctccagaagttccggctcgacgagccgttccggccgactcggcctcaggctcgcggcgttgtcctgctcctgcgcgccgccgattgccgacctctctgccgaaacagcaatatcgtcgagcggcccgcgctcgtccaagctgttgaaagccggcggcgaagggtcggccgtgggtgtaaagggcggcgagtcgggcactggcgggagattctttggccaggtgccgtctgcaaagagagagcagagcatcagcacgtgttgttgggcgatagttgcagctcagacagaagggcgaacctcggagccagccggcccggaggacctatgaacgggtgcaagtgagagtcaatatgtgccagtcggtcaccggagggatgcatcgcggcctgagggtgcaccttaatggtcagggcgagcggcatgggacgcgcgagctctgcacggaaacaacacaggaccaaccgggtcagccatcgcccagtcagagccgcacgaggggtacgcatgctcgctcggcccctttggcgagagggtcactcactgcgcccgcctatcagcccgcgatggacgttctcgagcccagacttccacagcccgctcgggatgtcgtctccggtaccctgatcgcagagcgccagcagctcttcgagccgacgcaggctggcttcggcgccgcctgcggacgacggtctgggcgccggcgctggccgcttggagctcgggccgccgctcccggtcgttcttgacgaagcggccgcgccggatccctgagcgagccaagcagcacgccgagcgtggaagacggcctcgccgtactcgaacggctgcgtcggagggaggttggcggctggcgggatgggcgtagggtaggctgagccggacacggtcgagccggaggcgtgcatgctgggcgtcgtgcgagagcgagcgctgagtgtcggccgagattcgagcagggagcacaggggatatccgacgaggtctgctaaggtcgtttacttgaaggcctcgagtccgccggtgctgcagaggatgctggtcgggagacgggcacgagcactctcgaggcgacaaggccggcaggcgcagcgcacccgccgacatcgacactctccgaaccgtgcctcgcccccatctccagatctccagatctcagtcgcagtcgcttggtccatctaggacagcaggcggcaagaagcgcagcgttcaggtcgcgtgcgcgatggacgcccagaagcagtccctctgggacctcggccaggacgaggcggttcgtcggctcggacctcctctttgacgccctccgacccgggctgaccgacctgaccgtgcctcgaccgcctgcaggtctccgtcaatcagcgggcgctgatcgacaaggtcctggccagatactcgggcgagaacaccatcttccggttcgtcctttggccagcgggatgctgcaaatgggtcgctcgatagagcggcctggcgagggacgtggaccttgttccgatcagccagctgacccacaccgtctgcttcgtcttaccacacagagagctcctccagaactcggacgatgccgaagccaagagtgttcagcttcacttcttcaccgcggccggggctgctgctgccgatcggactgccgccgctgctggtgctgcggccagctcagacgcgtcgacggccgagccagccgggcttgtcgagcggcctgccgccacggtccctgacctcaaggctgcagaaatcacgcgctacgtcttcaagaacgacggcatgccgttccggccagaggactgggcgcgattgaagagcatcgcaagcggcaacccggacgagtcgaaggtcggggcgtttggcgtacgtacacggccctcgttcacgtcagatgctttggattcggacgctgacctcgcttccacctccttcaggtcggcttctacagcctgttctcggtgacggaggaaccctgggtcgagagcggtgacaccttcatgggcttctactggaaaggcggcggcgaccaggtgcgttctgtcgtagagattcgtccgtcgtcttcttagtcttactgacctttcttcatatcccggtgccgcagctctttgcccgatcgggccctctgccgaccaatcggctgagctccacctcgcacttttcgcggcccttcacctccttttcgatggacctccgctcgccgtcgccgctgccatcctcgccgctggagcttgcccgctttcttgctacaagcatcaccttcatgcggacgatcgagcgggccgagatctttgtcgacggccttcggcttgtcctgatcgagcggcagctcggcccgcagcagacggtcgagatgcccgctggcctcgagcgcaaaagcaaaggcggcgtcatgtttgtcgacagcttgtcgtccaccggtacgcgtagtttccttgccactcctcgcgcagtgcttgaggtcggcaaactgattactctccggtcggccagatgtccgaatctctgcctctattcttcgactcacgtacacctcgtcggccccaccaccacctccgccgcccaagctatttgccaagccagcgataccgaccgtctcaaccttctcctcgatgttctcgtccgtcttccggtcggccccgtcctcgagggcactcacgcccgtgcctccgcatccggagccagagaagatcaaggagaaggaccctctcgaggccatcgtgacgagccttgccctccgcattgttgcggcaaacatctcggtctcagtctccaagacattcggcgtcgagctcgagcgcgcgaccaagaagccgccgccgaggcagacgagcgttgccctcgttttcaccggccgcgaggcttgggaggaaggcgagctggctgacggcggcaaggcgacggaagacgccgcagaggaaggcaaaggcgagaagagcgtctttcgcggtctccgggccgatctcgacggccgcggcctggccaaggtgttcatcgggcatgctaccggccagacgaccggcatggctggccacctgagcgcgcgcttcattccgaccgtcgagcgcgagagcatcgacctcgtcgaccggcacgtcgccgtctggaaccgcgagctccttcatgttgccggtgcgccctcgtcacgctcctctcatactggcagccgagataccgaccattgtgggacacgcactctcatcaggtttcctctgccgggccgtctacgagatggaggtcgcgtctatcgcctcgctctgggctgcctcgtcatcaccggcctcggctctgccgccgccagaaacggtcaaatggctcattgatcgcttcgtccacgtccttcgcttcttctcattcttcccatcgacgccgtccagcgtcgtcgcgcgggagctcgaggccgccttcttttcgtgcgtcagccggagcaagggcgttcccttcttggccgaaatcggtgtcaaggaggcgaccattgttcggatgcctcaagctgcagtcgagagcttcatcaagcaggtagggctgatcttctgtcaggagggtgattttcagttttcgctgactcgccgagcctaatgcaggtccccgtcgttccggcggctgttctcagcgcctcgccgctcatcatcgaccagcttaagctgcgcggaatgctccgcgacttgtcgctcgaagacgtcatcaacgagctcaagaacaacgtcctcaacgaaacccagatggtggccgctctccactggtggatcctcctctcgcagtcgcccggctttgacccatcgtttcgtcggcgtttcctcgacgtcgccgtctactcgtaccagctcctcggagagggcggtacggccaccggcgaggaggcggttcttcctcttgcggccgtcctgtcgtatccgaacccacgaacgggcctgccggtcgatctaccgctgccgcccgacacgctgccgttctcgacggccaagacgctgccgattgacaagctccagtctgcgctcggctttaaggagctgaccgtccccaaatggctcgcgcacctcgcgtcggacgcgacctcggcttcgtcgatccaggtctcgccagcactagccgagcgcgttcttggaatcctaggcaagagctggaatggacttagtccggcggcacagagcgccgttttcggcacgctcagcgacaagtcggtcatcccgacgcggtctggcatgagtcggcccggcgaggcatatcaccccaaggtttccctcttccctgacctgccggtcgttgccttcccgggcggcacgccggtcaagggccagatggagaagatcctcgttgctctcggcgtccggcggcacgtcgagcttcaactcgtcttcagccggctcctcggcgccggcgggtcgatcgtcgacctcgtcaactatctcgtctcggtccgcgagacactgacgtcgactgagatggccaagctgcgcgagacgccagccttcccgcaggagggggctagcgtccgtgtcatccctggctcgctctatgagccatccgaggagctcaagctgtcgggcttgccgctgtcgtttctcgactggccggccaagtggcggtcaaactcgaacgaggccagactgctttttgacctcggcctgatgaagcagcctccgatcgacacgcttcttgtactcgccgccgacccgaagaacgccaaggtccgctcgctcgccctggcctacttgacggtcaactttgctaagcattacgcggcaacctgtacgtgcgagcgttattctgttaggatggacgcagtcgctgatgctgagcttcctccttagacggacggtcgtccaaccgcaagctgcctatcctcccatgtatccgagcagacgggtcggcgtcgtttgactcgccgctcgagatctacaccaaccctctgtgtacggccctcggcttctcggtcgttgccagctcgacccgcgagttcgcgagctcgatgctcaaggtcccggccgatccgccggccgagcacctagtcgcggcgctgctgaagagcccgccgcgcgacgtcatctctgcgcaacgttgcttcgaggtcggtccaagcgtttcgatctctacaagcccttgcaagctgaccagcctacttcatccgcatacacagtatctcggtgccaaagtctcgaaccttcctggagccgccgtcgacagcctctatcactctgcgatcgtccccgtccttgaggccaagagcaaaatgctcgcgctgaaggcccccaaggacgtctacctggccgacgccggccgagacggtgcccccagcaagggctacaagtctctgtgcgtgatactcttgccgtgactgtcacttttaatcttagaccttgctgaccgcagattgctgtcctggcggccaacagcttcacctttgtcgactttggctctggcgccaacatcttcctccggtcgctaggagtgaaagacgagccttcgccggctgatgttgctgcgctgctcgtctcggagccgcaacacttcctccagctggcaggcacacccgaagcgtgagtttctttgttcgccacaagagcgcagacgaaggactgaccgtctctcgaccccccgtagctacctcgacgtcctgcgcaacatcagcgccagccgtattccgcgcgttacgctcaaggcgatgagcaacgcccgcgtcctgctctgtcatcgccgcatccggctcaagagcgctccgggcagtctcgaggaggacgactacgagaacgtctacgaactcgctttcccgaacgaggtgagctttggcgtgtcctccgtcgcttgcaaaccggtcagaagcctgacctggtggccgctgcagatcgtcatcctcgatgagcccgtgtcttcacaactttttgtcgacgaactgctcgccgctcccgaggagtcggccttggaagagtacgtctagaactctacgtggctgcgccgtccagcactgatcagaatcgccctcaggttctacctctccctcggcgcgcacaggctgtgcaagctcgtcactgaggactggcgtgagcaggggccgtaccgtgaccaggcagcggtgcgtatgacctttcacctgcttggctggcttccgcgcatcagcttctgacctgccttcgtttgttcctacagctggctgtcaacgtcaagaagctcatcttcgagaggatccccatcttcctgcacgagcgaccaaagtgtctgctcaactatgcgaccctccagcgacaggttcgcctgcaaattctcatgcgacgctcgccaactactgactgaagcctgcttgtcgtccgcagctcgaggtgttcgaggcccgctctcttctgctccgtcgcaccctgaccgtcggcgcctgcaagaaggtcaaggaggagacgtcgagcgctgccgccttccgcgagaagagtcgcattcgcttgctagtctcggcggacgtcgagctcgacctgtatggttcgtggcgacggctcatggaaagggttcttctccaatattctaacgcatcgacattcgcctttcacagaggtttcggctgccctcaccaaggttctcctcccttcgccccgggcgtccgacgcgctccttttacacactttgctttcgaccccgctgccctccctcaagcgccgcggcttcaacaccgaccggatcctcaagctcaagcgggccgagcgactcgcagaggaggcgctggcgtccagccaggcggaagaagagcgcaagatggcgtcgctcgacattgagctccggcagatgtttccgaacgcgtcggcgggcgaggtcaaacgcgctctcgccggccacaagtcggaccaccttgcccatgctgcgaacatcctactcgaggcggagaagacgagaccgccgccgatccttacacccgagtcatcaacgaagcccaacgaggcatcgacgacaagcgcgcccgcggccggtatcgagcgatcgctggcaacccggccgccgccgcaggcacccatgtcgacgacgcccaagccgcccaagagcctcttcaactcgatcagagataccattcgccgacctgaggcgcgcaacggatcgtccgaggtctctggcccccgcccgactgccgttcagcagcggccgaaggaggcgacgacgacgacgcaggcgactacaccgacgccgccaggcgatatacgggccaacgtcgagaagatcgtcaacgcgtcgcgcggcaaccgagcctcgtcgatcgtcagcgagcagaaagtctcgtcggtcaaagaggccgcagagggtcggtctgacagagaccgaggtttgtgcttccctcacaactgaccactacgccttcctttgccagactattgctctgtcgacggtgccaaaaccgacctcgtctttgtggccgacattccgctgcccggtgccaagatgcagttctttgccgagcggggcctgccaaatgcccgagccttccttgaggcgcacgcgggcgaggcgtcgcgctttgccttagtcattctccttccgctttgcggcgtcttcaagctcgacccggcatctttggtgagcctgcccttatgctctggcggagttacaagagactgacgcgctgcgctgttggctcgcagcacatgttctacgaccgggcaggacctctcatcgccttcagtcggtcgtacacctgacagtctcgaccttctgtatgcgccctcgctgaccgcgtcgcctttgactcttttgcagaccgaggaggcagcctatttgtcaacttgcgatactacgagagctggcacgacccggccgttaaggcgggcgtcctcgaggattccctcgtctcttggtacttctccgtgagctcactcgacctaccttctgagttcctccgggctctaaacgctgacgcagccctgcttgtcccccccccccccccgcctgcagctcgcccacgagtgcgcgcacaacatggttcaatcgcacaacggtccgtccaataggcgtcttgcgccccgcccgaaggccagtgactgactcgtctcctctgctctgcagcccaattctcatattgggcgagctcgatcgcagaacatttccttcagcccttcacggtcctcctcgccggcgtgcgctagactttcgtcccctctcacgacctcttgccttcatgaccctgtgacgaattcgaacaaagcagcccgcggtgattaacaggacagtctagcagcggccagagagggaggcggcccttcaagatccgttcgtcgacacttgtgcacgatcccaagcgccctcaaagccttgcaggccagatgctgcgcaccacggcggccggaaggcgtcgtctccgctccaatactgccggcagcgaagcgagaagcccgtctcgtgatggtaaccgcgccagccttgcaggtagccctgccatagctggagcatgccgtcgaccttccggtcgttcgtcagatgggcgcgagcgtaagcgaagccgagttgagctttgcgtttcaggccggcctcgttcgccagggcggccgcaagaacgccgttgatcgtctgaatattagagcacaggttcaggctcggcatcagcgcggagggcggaaggctcgtcgcggaaggtttgatgggccctgactgacctcaatgctccagccctgcttcagcctgaagaagagcacggcgcgaccgtcagctacgggcacgatgcgacctacttgagggtacacttactcgatcataaactcgagcaggtcttcctcgcggtcggtcggaacatcagaggcgataacgcagccgctgagcatggcctgcgcccatttgcgaatgagcttacgctcgaggcttgagtcgaactaggcaagtgcggcgaggaaagacggacaggtgtatgtcagcaggctgtttagacgggtgataaccccgacccaggtcgcagagacgcacgacgcagatcttggtttctcgcagcgcgctcgcgaaggccacgcgctgcgcccggtgtcggtcgtgcaaagggctgccgagctcgtagcgctccggtgcgacgacgtcgtcggcctttgggatcgaataccctatcagaggatggggacaatgattagccaggcggacagagagggcgaccgacgaccgggacgcacccggatggctataccactcgatcggagtcttgcccgctttgacggcgtcggtcacggtcgtccggatcggatagaagctgcagcaggggatttttccggtcagtagacttgtcgagactggcaacagcaggaggagacgcgcacctgccatcaaagccatagccccgcaaggcgaccttcttgtcgtcccagctcggcagcgggtaaaagtcccagcggttggccccgtcgagcgagtggccgaacaagtgcatgtcaaactctgggaacgaccgcctgataagctcgtagctaaagaggtcgccgagctccgatgggtacttggtcgtcgtgatgttgaggacgggtgcgtaccactttgagacgcagtcctcggagtggcagtcgccgagctgctgggcaaagagcgtgccgtgacccggattatcgagcgcagctggcggagaaggaggtgagaagcaaagagagatcgcctaagccttgagtcaggttgaaaaatgcctcgaaaggactcacgcgagtcaacaggaaagatgtcggatatcgtccagacgaggtcgtagaagcccggccccgcctccttcaagccgctcccgccctcgcctacaggcacgcgccgaacagccatgttctgcgagatcgtccgatcggcgttccagccggcccacttgggtccccagacgtccgtctcaactttcgggtgggcgaacgcagccgagatgagctcgaccatcgccgtgttcatgcgctcaagatggtcgtcgaagtctggcgagagaaacggggacgaacggcggaataggtaagatattgtgcgtcagtgtcgcgtccttctggtcgatagatcgaacagaaacgcaccggtcaggaagaggacgcgcaccctcccctggtcgccccgaccggtcatttcattaggcctgctcgtccgatagtcccaagggctcggctcagatcctgcagaccaccattctccttcagcagcggaacgccatcctagccggggcatgttggccgcaatatcgaacgctgcgtggctcgtgaaatcgaggtcgagcgcccgctcgtagtcggctgcggcgcgccagtcgagagctacgcgcacgacagcaaaggcgaacagggcgagcgacccgggtaaggcgagagagctcggccgtcttagcgagaggtcggcacagagcccatgagatcggacgctggaggtatcgagggctcccgaggaggaggcggagtaggaggacgacgacaacgatcggtggcggccggtcagaggccgctcccacaagctgccgccgctcgttcgccgtcggctgctgccgctacgaccgccgccgctgccgtcaggactctggctagattggcgcgggtttgacttgctccgcgaccgctggacagccggcgccggaaggtctgaggtcgaaaggaaagcggctgagggcgcgagctcgggcgagagccgggcgtctcgagacggctgggtcaggtggaagactggcgtcgtccggggtggcatgctgctctcctgatggtgaggatagctacgggaggcagcttgtgaccatatgggacgatcggggccggctgcaagatgatggtagagtcgagaggacgagtgagctgccgggagcttctaggcggcttggttgagggaggacgcgcagcaagcagcccgcctcctgacccaaccccgtacgcacgaccgagctctacttgtcgacaatcaaagctctcgctcgatcggtctaggagtatgtgactaggttgttcaatataagcgtatgaatcaagaccagagagcggcctcggaggcgtctaatcgacgtcggcgactggcctcgtcagatgaggcgtacgcgtccaagcgctcgcaagaccgaggcacccatccatcgcaacagcatgccagacgatgaccagaagtcgccgaatggatgaaggttgtcgattgccgtcagccgtacgcggtgacggcgtcattcgtcctgctgatcgtgcattaaacgcgtcctcggtacaagcgccgcacgcgagtcgccggcgagtctaccggctgagccgtcgtgccgccaccgggcaaatataaagcgaaggctggcggcagcctcatcgtttgccagccttcttcttgcctttcttgcctgctggccggccttcgtcgtcgctgctccagtcgcccgtcttgccgccgccaacagatcccttgccgttcgagccgccgccgccgccggccgagggcccacacttcagcgaggcgtggccggtcagcttgatgtgatcgaacagtttggtccgggaggggaagccctgcttgcagatgttgcatttctgccgaagggagggccggcggcgaaccgacaggtggtcagcccgatgcgtgctcttgaatgctagcattgcctcccgtcgaacgggtcagacgcacctcgggtccgccagcagctccgccagccgtcgagtcaacagcaaacttgcttccaccacctttggccgccgcttcggccttcttgcgctcgcgctcgcgccgcttgacctttttgctcatctcgggcgtctcagcctcctgctgctcggcacccggacccggaccagaagccgaagcttcctcggtcaatggctccgggtcgtcctcggtagcagcagcaagcagcgctgcctttgctgcggcctctgcggcggcgatgcgctcggccgcgagcttggcctcacgctgctcgcgctgcttcttcttgcgcgccttcttggctgcgccggggacgttggccttggccgaaggttggtcgtacgcgtctccgtcctcgtcgtcagaggaagcgttggccggaggttgaagccttggagcagtccccttgggagagggtggagccgaatcctcgtcctcgtagtcctcgagcgtgatgccgccgacggcgtcgaccaggacctcttcttccggatctgtctcagaaagctcgtcgtcatccgagccttccgccgcctcgccgttgccctccgctcgagcggcctcctcctgctcagccccaaggcccagctcccagtcctcatcaagcatctcgcgcctcaaccggtcgatggcccgccgatggccctttgaccgctcgtgatcgcgccagcggccttcgctcttgccagatttcccgcaggcaatgcactcccactcgccgccttccttgctcgtgcggagcgagtcgccgtccccggcctcatcgccgttagaggcggaggaggccgattcatcctccgagtcggagtagacgtaggcggctgacgagctcgtccgctgccaggcctggggtgtgaagctcgggacgtcttgctgggccggtggcgtgccgccggcagccggcgtgcgcgcaccagaggaggtagccgtagggcgagtgacagttggaaaggccgatgaggctggcggagctttgggcacacgcgggtcgcgcttgcgtaggtaggcgacgagcgtctggaaggggcggcgagaaagagaggttgctcagtgatcagagtcctgtgacccttgaccttgttctgcgctgttgcaccgttgagccgccgtcacgtaccctaaccgtttcgttgtactcgcgcttagcgtcatccctcgcctttttgttgtctttctccatcatcctgcgaacgcgtccggttcctcgtcagcatcccccgcaagagggctcggccgtttccccttcaatgacatacctacggacatgccggacgtcgccccgctcggcatcccactgctcgacccactcaaagcccttttcggtgctgaagccggaccagacggcgtagaagttgcgaaccttccgatgcgaagggcgagaagggacgtcagatgaccagccgacggaagacaaagagaccgctgccgacgccgacgaccgacgtcacaacatcagctctgcacgcccgggacgcacctgaatgatggtccggtcggaattcgaccaagccgtcgatgacgtgccaaagggcgggtacggcggctgggggatctcggcgtggagcgcttcttcggccgagaggtgagcgaagagcgtcgagtagacttcgtaaaagccctgaaagcggcaggccagcgaagagttaatcagtctgagaggatgttgtcagtgcgagaggcgtaagagcagcacgactcacccccggcccgtcggccagaccgcccttgcgccagacgcccttgtcaaagaagcgttcgagctccctcaacccgagccctctcgccctcctcgtaggccgtccgccgtacgctttcttcccactcagcacgtcgtcgacgtcgcctgagccgtacgcatcgccacctccgccagacgacgagcgcaaggcggccgtctggcgccggcggtcatagaaggcgcgctcttgagggtcagagagcgtctcataggcctcttggagcttggcaaaatggagcgttgactcctcaaggcgattcgggttcttgtctggcagagagggcaagtcagcgaggtggcgtgaggcgtaaaggggccggcctagcgacgcaccgggatgccacttgagagcaagcttccggaaggatttctggcagtatggaagggtcggcaaggaccagagtcagccagcttggactagcatagccagcactacaaggtcctcagctaggcgacggccagggcggcaggagggtcggaccttgatctcgagctcgcccgcgtcttcgtcgacctcgagcagggtatagaagtccccgggcccggcgttctggcctgacgacgacgacgacgacgacgtgccgttagtcggccgcgactggtcggctcccatcggacgagctctgcctctgctctgagcgaggaagggagtagcaaggagggtgtcgtcctgtctcgaggtgaccgtcttggggctgagcgagcgccgccgtcctcgccacctgaaccaccaccccttccgcctcctgctccgcctcctgtcttcctctctcctcggcacttcagtatggcgagcgctcacaattccgaggatccgttccatgtcccggccgccgacattgggacgatcccgacccgctccgagatcaagcagcacgaggcccgtttgccgaacgataacccggacggcaagatgaacctcgcaagctggaagaaggcacaggttcgtggctggagctctcggctgccggctgacggagatctattgacgttttccggcctgtctcatcgaccgcgctctcgcagaagaaggacatcgcctcaaagtacaaggagtacgtcccgcctcgatcttgtgcgctcctcgccagctgaccgaactccgatctcgccgcccttctctccggccagcccttgcaagcacgcggccgatcagtcgatgctctgcctcgaccaaaacttgtacgacaagtccaaggtgcgacctgtctcgtcctctctattgagcgaagggtcggcctcttgccgggtgcatgtcggcctggcgggcgagagcgatcggcatcgagtccgggaccagtctcgtcacgtcgtgtgcccttaaactgaccgcctcgcttgccttttgccggcggacctagtgcacggcctacttccaggcgtacaaggattgcaaggagctctggatgtcgaaccagcgtgcggtcaagcggggcggccaaccctcgctcccgtcagccacggccacttcgactccggcctagacccactggctggcagagaagcgaggagttggacgaagcaaggagggcttcatcacggggtcggtgccagagtggagggaggacccagtgccaggcggccggcgacgagcccaaggccggacgcgctgggatcgcacgtcgacggcttgggcacttctctgtcggttggccagttgggctcaagcagtcgcaacctcgaccggacgacgaagctcggccccttcctccgagatctccgtctcgtttggcgtcggcgcgcgcaagctgccttcggcatgtagggagcgctaacaaccctcctcactcgaagcgtatggaggcgagcccggcctggcgtctcgatctaatcggcgatgcctgcgtagagcccggattgctctcaatctctctgctcaggccagatgggttgtccgcctgtcttgcagtggcgattccattccctcccactcgggctaggtctcttctcaatgaacaagatataccactctttgccctctctggcctcttgccgcgtgtgagtatgaagtaagatcgcccggcaaagcataggatgagcacagtgtggcaagtcagtgggagggtacggctcgacttgcccttccacttgtcgttcggctctccttgtcttctgcccagccaagtctcgagacgcagtctggcgcgcagtactgcgctgcggttggtggaattcgtagccgatttccgagggaccgcgtgtgatcagggaaggacgagggagccgatgaagatggtctgtcgtgactgaacggggttgaagagggcgcgatcttgagggtccgacattgaagggcaagcgaggcggccggccgccgctgagcgccattgcgaggttgaggagtaagatggtttggccagccagtcggaccctcggccaagcgtgtcgctcgactgtcgtcgtcgttcggaccggtggatgcggccgagtcgtcgtttggaagggaagatgagtcggacagcgccttcgtcgcctcgtcgcgtccgacccgaagcaggacgcgtcaggccgttggaagactctcgcgctcgcgctcaacgtcgagaggcaccggccccagcgccagtcacgcccgtcgacgttgactgagagcggccaccggtcgtagtcggaggtgcgagcttgcgctcttcggcccggagctcgaggatggcggcctacaagcggtcggaaggggcagggcggcgagggcggcagaggggcgagtgcaagcgactgtcagcggtcgattctactcaagtgtgtcgggcggaagatcgtacagcgagcgcctcgggctgaactccaccctcgatcagagcgatgcagctcgcgagcgccgaccggtcgaggcctgtcgagagcagggaagagatcgcgtcgagcgctggcggagggccggccgggaagcagcatcagtcttgagcggcgtggagagatggcgagcaggggcgagcggaccttcgagggtgtcgtcggtcgagcgagctgccatcctgtcctcttgggtatcctttcttagctgatggttgggaggaggccggtcgcagcctctcctgaactggctcttgacttctcttcgagcgacgcgtcgcgacccccgaacgccctccgacgtcaaccttccagatcttcgagccatgactgtcgcccagagcatcggccagcagacaccgacgccaccggcgtcgtcctacccggctcctccgccgctgtacaagtgcgtcctgttgtcgactcaccgccgagagcccctctagcgctcacgaggaggatgactgacgcgcgtcctcgccctcgaataggagcgtcggcaaccgggccaaggaccagctcgctttcttccacgtgctcgagcgactcaaggtgcggctcgctctagacgggacaaagccggagagtctgttgtgggacagaggacttcgcgcaagggcagagggagcagcgggagctggccaggtcagcaccggaggtcgaccccttcgaccgtgctctcaggcaccgagcgtacgccccgagcgcaccaacactcggccgctcgacctcgccctaatcctcttccaggcggacagaggcatcgctctgaggccggtagcgtgtcatgctgacccgcctcatcctcctctgacgtaaccagacccagaagcgcggcggctgggtgcgcgagggcgttcaggagcccgagtcgatctctgaccacatgtaccggatggccgtcctcgccctctgcgccccttcgagctcgtccgatggtccgctcgacgtcggcaagtgcgtcatgatgtcggtcgtccatgacctggccgaggcgcacgtcggcgacatcacgcccgtcgacggcgtctcgaaggccgagaagcaccggatggagggcgaggcaatggacagcttcctcggagagatgctcgggccgggcgaggcggccgaccggatccgaacactctgggacgtacgtctgctccggcccttcttccttgacgcgaccgctgcgccccagtttaggcctcgtccctctagtctggtcccgcctgcttcctctcaaaacctaacgaccggctccctttcgcctattccgccctcatgcaggagtatgagggccaagagactgccgaagcgagatttgtcaaagatctcgaccgactcgagctgacgttgcagacggtcgagtacgagcgctgtgcgtggccctacttcagctcatcctgccgggcgagcactgcacaagatccgacagctcaccatccttccttcccctcttcctctagcccaatctcagcgaaatctcgcccctttcctcgccggcacagtcccttacattcggcactcctccgcccaggcctggacgaaggcctgcctggacgagcggcacgcgctctacgccgagcggggcgagcaggccatcgagtgggagggcgtcgagcttggcgagtcaggcccgccggaggttggcagtgaggtccactacggccgttcatgagccgcccccgatcgtccggtcttcttgcacgcagtctctcctctcctctcctttgacgaccaattactctcatcaccctagatttcaggcttgcgataccggtaccccatctgacgaacgtagcctctgtgtcaagaacatacaagtcccatgtgagaatcgtctactggaccagatcgggtctcgcagaccccacggccgccgccggcagtgccaactgccccggcggatgcacaacaaccgccgctgacaggtggcctcccggccctcttgtcgagcctagactcgagctgagaaggatgccgcccgcgctgagcgctcggacgctcgccgtgctcgaccttcggagccggggcttatgttgcgtctgctgcggatggcccgccgaggcaccgtgatgggcgaccggaaggcctgcgcctgcgcctgggcggctctgtgatcgcggtcgagggggcgagtcgagctggatggtcgggagaagaggcgttcgagcggaagaaggtgagcggccccggacggacgtcgacgatcgtgcgagcgagattgagcggtcgaccgttgaccagcgcaccgtagagggcgatgctgcttgcctcaaagccgtcgcggctcgatccaagcctccttcgccggcttcggtccccgccgtcactgcctctgccgccgcccgctggctgccagcgtcgttgtcgtcttcgtccttgtctccgttgctgccaccctctggtgccaacagcgcgacgccaacgagcgtcgtcgtcaagcccaggacgaaagtcatgaaccgccttggtgagacgtcgtcaaagtcgcgatagaggaccgatgagccgatgaggaccgagagcgtgaagcaggcgaattgggcagggacgacgtgtttcgatgagaatctctgtagggctcgattgaggtaccgcagctgtccgagggcggtgacgaggagaactacagccgagctgtagaagattggttgacggaaggcgttccagacaagggaggaaaagagggccgagacggcttttgtcgagaggacggtgaagccgccgaggagggcgcagaggacgatgtcgaccagcaggtggtcagagtcgtgacctgactcggctagaatggcgaggataacgatgagggccgcgctagtaggaaaaacggtttaagaggaatcgttcaatcagtttttgagcacgagccggcaggaggggtagtggagtatgtcctcacacgatggtcgagtagacgatgaaggctatccgcgaaagagctctgacaagcgttgatgggtcgagcaccggctgcgtcgtccgcgcagagaggacgatcgtactggcgccgatgatggcgagactgacgccgagggtgtcttgcgagcgaaagcgctcgccgaggatctatcatgcacgagtggtgaccccgactgagttagcagatgtccatctctacagttgacttaggagtccagcacgaccctgagatatcgactctgagcggagagtcaggcgaagggtgagtgatcggcgggacgtacaaggggagcgaagagccagttggcgacgagtgcggctgtgccgagcggggcaacgaccgacgccggcgagaaaccgtacgagataaagttggcggtttcgcctatagcaagtaggaggagtccggaccaccagagtggggatgcctgaaggtgaatcgagggttgcggggagacgtcagcgcacgacacgcgtcggggcatgaagcccgtcgggaacgcacgagaaagttggcctctcctccaggtgtgtcgtcctcatcagctgagtttcgttccagactgctgaccgagctgttcttgcggccaccgttgccggccagcagggacgtctcttcgtccgatgctcgctgcggtgcaggcggcgacggccgacggccggcggatgcaggagcatcacctcgatcgtccgcccgcggtgtcgacggccgacttgctgctgctgctagccgcttgtgcgcgagcttctggacattgagcgcgaggctgatgaggacatctatagtccggaacgcgaagcgagatggccaagggaagggtcaaggggtcagccctcttgcgcagcgcagccggttcaagcagcgagaaggaacacagactgccgccgagcgagatggcgacgccggtcagagtcgccttgcggtctgcgtccatgcgcagggccggaaagggatcgctggtagattgtcagggcggctgaagagcaggtcgtcgtcgtcgggcagagtcgtcgtccgagtcgacctcgtcccggcatcacggccggcgagatgaagctcccttcgacggccattgcgcgaaagccttccctcccagccttcctatctagcagactttagtcatggcccggactcacaagggtggaggtccgcctcgacagtcccagtcggcggcctcaggccaactgccgtcgtcggcctcggcagggggagcagcaggagccggcccgtccttgtcgagcgcgcagcggtctcctctcaagcccgactcgacatcgtcgtctctggccaccgggaaacaggccgagcctccgagaggaggccgtcagacggtcgttctcgatgcggcgatgatccgagcgcttgtcggcgatgatagctcggggcgtggtcggcagggctcgagcagcaaggcagccgaggtcgaacacctcggcttcaagtgttcgtcccccctctgtcaacccggcagtcgcttgagcagagctcccagactgacccctccttcactgacccgcttgcagacaagttcaagccctcatcgatcaccaatcagaagccagggaccttcactgtgccgtcgtcgtcggcctctgtcgacagccaacacgccgtcgtccatctccagggggccaacaagaccgaggtccacggctttgtagccaaggtcgaggagatgaccggcgctggagtagtagcagggcgggacgtcatgctggtctgggatgagtccaagcttgtgcgttcaactcaccgtcttgcagatgaacttgtaccaggctgacctcgccgctctactcgtcgcgcggcagacctacacgatgtcgccgatcgcgaggacctacaacctagttcatgacaagtcgctcgcccgctcgcacctccctaccgcctcgccattcgagccttctcgggtagcaccctcggcatcgcacgcgtcctcaacaagaccagtctcgatcccaagcgcggcgatggatgtcgacgtcgacggagggctggcaagcagcgcctcgtcgtcgtccgactcgagcatgcggtcggtcggccgagaagcagtacctctgcctgaagcagtaccccaacactcagcagcgtccatcagttcgcacaacgcgcgcatggtcgcacctccctcatctctgccgccacctccgccacctcccccacagccgcccgcgccggttcctacggttcctattgcggcattcaacgttccagtcgaaggcgatcccgaagccgacgccgaaggctcgaccgacgacgacgacgacgatgacgaagacgacgactttgcggctcagctcgagcaggagctcgcagcgctcagtggcggcggtgcgggcggtggtggtgccggcatcgcgtcgtcgtcgtcggccgcatccgtcgtcgactttgcgcctgctgtcgctcttggaggaggaggagggtcaaacggccgaccgatggccgtctccgctgctggacccgattcgcttgcggtcggagggctcgcacaagtaggcagcggccgatcggacgtcgccggcaaacggcccgtctcactcaacagcctcatgggtgcgtctcttacctgtttcttgacgcttgtcggcgatcacattgctcaaggcacagcactcatggccgttcgctgacctgggactctcttccctcctcgtttcgcacgccaggcgtagccgataacgagagcgactcggaaggctcgtcggcgagcagcgacagcgactgatcccgctggccgcacgctcgctttactaccttgaaaaccttctcgtaatccgccggctggccgcttcgaccggccgtcaagcattgtcggcgcgtctcttcctcggctgccgagtgtcgccgaccaatttgtgacgtcgcggcaaaagacgcaggggccgtcaaggggagaacggcggactctcccccatcactcgcgcgatctctcgcacaacctgttgtccgcctgatcaatcggccgaacgatgcgcgtcaacaatgtcgatcgaagcggtaggcgcgtgtcgtcttggtctggcgcaaggacgtctgaatcgcccatatcgacgggaagatgtcggagcgtacaggtcctcgctttctggctcggaaggacgatgtgatgcggatgactcggatgatctttgttcaaaacttgtgactttcgagagctgaagcgggcgggagagttatgggcctgaaggtcgccagggaagaacagactcatcggccttctcaccgccgtgatctgccgcactcgagactcatgtggtgaacctccccgcgtcaggcatctgctcttcatgtacgaacagtgcatgccgactcgcacggcctgtacctcccctccggttccattgtaatccatccctaggcacgcgtgcatcgatcggcgagacacgtcgtttgggccgcttcgacctgcgctcgtggacagaacgactgaccgctgctctttccaatgatccggcagtatgtcgcccggtacgaatccaacggcttctagcgagcgacggcctattgctgcctacctcttgagtgtggaccgtctgcgtttctagcgagtcgcgcggccactgacgccgtgcaccgatgtgccacattcctagccttttcgtcttactgcgaccgcttcgtgcaagcgtcagacgacccctttcatcgcatcgcattgatatatcaagtgcgttgcagcacgtcgtctatccttccttttcgaccgtccctaaccccgtcgctcttcggcgcagcccctctcgtccctcgcaaccacacagttccatcgctcgcccaaccaccagcctctctcgctctcatttatctgcgtccgcctctctcgcatcagctctcctcgcacgtgtcaacctaccaatttcccacggtcaagcattcctcccatgtaccgctcgatcccgcgttccctccttccgcacatctgtcgctccgtcacgctctgcacgagccacctcttgatgaccactcgtccgcagaggccttctcttgtcagcgacggcgtcagtaacttgaaactctccagcgacctgcagactggcgtctctgggttggcagtctgagctgcgtgcgcgcgccgtttcacctgatgccagtgagcctccctcatggccgctgctacggcctggcacgaggagaggaatgtcagactggccaagcatcagaggagtgggttggacccgagtccgcgacattgccggccgagtagggctacgatggtgaccgcgcagccgtcgtcgccctcggtcatgctgaaggaacccgggcgcaagcagacggcccgctcgagcggttcccttcgcttccacccgccctcgaatatcctgtctttgaacgcttacctccccgacctgcctttcttctcttttgcgcttcctgttcttcttcatgagctgtgctcccggtcttgtcagccgcggtgcacgaccgaccctgaacaagcttattgtgctctgggggttttccattcacacttcacactatctgggattgtgcccgccacgccgctggcccgccccgcgctcccggacctccgcctcgcccggtacgaaggacgtctcccagcctagtcactcgttcagaactcgtcaagatggtacgtagagccctcctttcatgcactcctcttgctccgcaggtcacctaccccgacatacggacggacgaaccgaatccgacgacaccgactggacctggctcgtgccttagcggcttgggcccgacttgccgcgccggaccgacacgacactcgcctctcctgccgccgctctcgtccagaggacaagcgcaggcaggcttgctgcaggcgcgggaggcgtcgcgctgctggtcgtaggagcgggagctagggcgtcggcgcaggccccgtcgaagtcggccgagcggaagctcctgctccgacctcgtgcagccgaccggcggccagcgagaaaggaaggcctggaggagctgctttctggtcgccaattaggcaggccagaagcagctcctcccgcccgccttctccgctgccgctcgggccgacgcgtctggctaactgggcagaccagcttgctcgcctaggctggagtcgcgcgcccgctcgccgtcgtctgcggctcagcttcgacggccctacctcgacgcccggacccagctctcccggtcccctcacacacccttcgccaaacccagccgccccatcacccccttccatcactgcctgcggagctcgagctcccctgaatggcgcaaacgagcgctgactcgtcccgtatcgcctcgttccttcagcccaaggagatcagcgacatcaaggagttcctcaccattgcccggcgcaaggacgcttcgtgtacgtcttcgagttcgagacggaacgcaggatgaccggagctggctgcgagggaagcagcgggttggccgggggcggcgttcgggttggagccagcgagcagcaaggtcaggaagctgacggccccggttcctcgccctcttgtttcagccgcccggatcaagaagacgatctcggcctcgcccaaggctaagaacgccgaggtgaccaagttcaagatccgctgcgccaagtacctgtacacgctctcaatcgccgaccccgagaaggccgagaagctcaagcagtcgctgcccccgggtcttgacgtcaaggagatcggcaagaagggcgtctcgaagaagtaaattggccccaggccttttacggaaatcgtttggaccgagacgagacgaggacgagcgcgtcggggcgtgcttccgcgcaccacctcccacccatcaccctgggagggcgctcgccgcttatgcacacaatgacttcgcacgacacgcgcgcgacagcgggagggccggacggagacgtcgtctgaggcacgtcgagagggaggctgcgtcttggtcacagatgttggggacgacggcagacggggtgcgacgcggaaggggacggtgggtgccgtcgggagacacctctgctgttgttgttggtcgtgcgaagcgcaggacgagccggcgagctcaggtcaaggagaggcacttcaagaggtcatggtctcgaggggcatggcaggaaagggtggcgtttaggaaagggagcgagcagcaaaacaggttcgagggtcgggcgagcaagtgtccagtggggcggccgagggcgcgcacagaagcaagggtgagggtcagggaaaaggggcaacgaaaagcgaaagaagaggcggaggcgaaaagagagagggagggcagtattacagaagacgagaagacgtgcgtgggaaggcagtgggggcagacagatcgatgcgtggaagtgagcagtacgggttgcgatgaaacggagggcatagcggtcttgcgagggagtcgagaagcagaggttgagcgggcggcggcgatcacgagcggacggtcggaggtgacgagggcgtgaatgagtggccgccggcgttgtaaagctgctgccggagctgttcaatctcctggtccttgctgcagatccgcagacgtcagggggtcagcatctttggactcggcgataggaattttgagggagacgcacgcgcggcacaaggccttgtgttcggccgcctcgcgctcggcccgctgcttggccgtcgtgaggtcgccctctgctcgttgctggtcgaagaatggcaaggagagatgtcaacgctgaagattagtagagacccaggcgtatagcgctcacctgcgtgcgtattagctggcgcatctcctcgagcttcttttgcgtctggaacggatccgggtcggatgctgtcgacgagcgcgagctcgcctggtctgactggttggccggcccgttgcgctggcgcgtgacgtcctcgacgtctttggccttggccttctcgagcgacttgacgtagactttgaggctctggagctcgacccgggcgtcggctagctgccggtccgtcagtcgcttggccgcctcgagcacatagacgtgctcgacgaccgtcttattctcgagcgagcgcagtaacttggtctcggcattgagctccttgtagtcggccttggccttcgctaggctctgctcgcttcgctcgagccggtcctggagcgaggcgaactcggcgtcgcgtttgagctgggcgtcctcaagcttgagccgggcggcattctcgcggtcgagtcgccgctggagatcggccatctgcgccgcccagttggccttctctcgctcgatggccacgatggcgtcctcgtaatcggcgttctttttcgacattttggctgcttgccggtcgagcgcctggcaggaaggagcgacgcagggtcagtcgtcggctgctttatccgagtcgcacaaagatcgcgagggatgacgcacctccttcgacttctccgcttcgttcagggaggccgtcgttgacgagagctgccaacgaacggcctgaagatcggccgtcgacaaccgcagcgcgttggccgactcgagcagcgagtgctcgacctcagtgcgcgctttgatcgcgctcgtcaagtcggccgttgtctgccgatgctcgtccatgagagcgccatgcttcgtctggagggccgcatgctcggctgtaacctgtgcgagcgattcagcggcccgttccgactcggccgccaggtcagtttcgagggtcgagacctcggcccggagcgatgaaatctcgtgctccatactctgcgccgcttgcgagcgtttggcctgctcagaccccatcgtcgtccgaagttcgtcgagctccgactcgagcgtagcgcgggctgtcgactcgcgttcggccaggtccttgagctgatgaatttcggtccgacgggcgtcgagctcggcctccagcttggacttgtcggtctcgagcgctcgccgggcgtcggctgcagacgcggtgtcggcaagcagtcgcgaaaactcgtcctccttgctcttcagtcgcgactctgcgtctgcgatcttggcctcgagcgaggtcgtccgcgttcggcttgtcgtcagggccgactcgacctcgacgatcttggccgcctcggtcgcactgccaggaacggagtcgtcggtcagcagcggggcgagaggaactactcgaccgagaacactcacctccgttcactcgccgccgctgcagtcgacttttgctcggcctcgagtttggccgcccgatcctgggccttcaagaggtcatcgctggttgcctggatctggcgagcgtgctcgcccagacgcgccgccaggccgtcacgctcgagttcgagttcccgacacgatgtgctccgagcctggacatcggccgacaggtcagcctcgcgacggcggaggtgctctcggtcggcctcgagctcggcaacggcgccggcgagcgcatcgaactcggttcggtagtggagtgccttagcctcggccgcagccttcgactccatgacgcggtcgagctggtcggcgagcacctcgacgtcggccttgagcgtgtccatctcgtgctggagcgaaagcgcgttgcgctcgtgggtgtcggcctccttgagccgaagcttgcgctcgtcgtcgaggtcagactcgatgctgcgcttgtcggcctcgagcttggcacgaagcgcttcgagcgcgatacgttcctgctcctcgcgctcggcccgctcctgggcgagagcgagctcggcctcgcgtcgacggagctcggcgtcgaccctcgaggcgccgagcagcggctggaccgtcgtgtagagccgccaccagggccactccttgagctccttgtaaagccgggcgttattctggatcgtccgaacggcagcatcgcggttgatgatcttgagcagctggcgccgggcggtcgctcgctggcaggctgcctggaagcggctgacgaggtcaaagaggtaggcgtcgagccgctcctgcaggtcggccaagacgccgaccttgaagaagatcttggtcgtcccaagcttgacctcggccggatcgaggtcgagcgcgacgagcatcgcctgggcggcgacccggccatcgacgtagccggtcgggatcgcgccgggcgtcagaatttcataccgctggcggaactcgtcgaacgggatccggttcgggtagccccggcgggcgatacggatgccctcgaggacgccgttgcatcgcagctgatcaaggacgagcgggacgtcgatcttaccgggcgccttgtgccggttggggacgatgcaacggacaaagtgcggctcggtcgcgtcgagctgagccatgagtttgccgagctgctcctgatggcgctgagcgaccgtccggaaggcacccgacttgacacgccgaccgccggcattgctgctcgctggtgcggcctcggcctcacggtattcggagaagaggccggcgacaaaggagctcgccgagttggcgagaagcgacgtcatgttcgagttgagcggatctttgttcttctcgagccagctgtcggtccggtactcgactttatcggcgtaatgccggacagtgaagccctggttaaagcggatcgtgccgaatttggtcgagccgccggtcgccgtcttggggtccggtgcgtgccagagtgatgtgagcttgttgaggaaggtgacgtcgctcgcctgcggcatgatgcactcctcgtcgaggcagggaaagatgccgaccggctgctgggccgagccttcgatgagctcgatcgtcgactggaggtcgtgcccaaagtcgacatagtcccactcgatcgcctcgcgggcatactcctcctgctcgagcacgaacatatggtggttgaagaactgctggagcttctcgttcgtgtaattgatgcagagctgctcaaacgagttggtctgcgagggttggaagtgttaggtcagcaacgcagcctcgcccaaacgtgcaagagagcacgcacctcaaagatctcgaagccagcgatgtcgaggacgccgatgaacgccgactggccatcggacggcgtgtcaagcgcccggttgacgagctcaacgaccgagccaaacatcttctcgtacatcgtcttgcagagactgccaagctcgtcgacggcctgctgctttgtccgggcctggatgacgacctcgcgcccggccttaacctttggccggaggacagccttggtgaattcggagggcgagagcccgagcaggtggcaggccttttcgagcgcaacgactgacttgatctgcgcctggtttgaccggtcgcctgagatctcaatgttgccaatcaagaggatcgcggacagaacgcggaagagatcggcctgctccttctctggcgtgaagccgacaatgtcgagcgcgctctgcatgggaagccgacgtcagccttgcgacatgacggataagagagatgtgccgaccgcaccttgaactccttccactcctcgaggtcgttgacgccgtcgatctgcgttcgcgacattcggagatactcgtagtccttggcgacgccgtcgagcagcagcgattctgcaggagcacggcctgtcagtaaggttgcaggggaggcaccaatcgcaaaactcacctcgcagcgccttgccctcgggaagcttctcgccgcacgccgcgagcagcatgtaaaagatgtggaacgagcgctcgccctcgcttcggttgacgacgcgcgacttttcgagcaggtaccagtcgttgttggcgccggcaatcgcgccagacggcgagaagaagatccggacgaacttgccctagaagagagccgaatggatgcggtcgtcagagagagtcgacggacgcgctgcgggcgacaagagccaccactcacgaaacgcgacgagttgttattgcgcatcgtctgagcgttgccgaacgcctcaaggatcgggttggcctgcaggatctgcttctcgagcaggcccgtcttgggcgtcttgacgaagcccttcgtcgagcctgagcggacgaccgaccgggtcgaggccgaccgagcgagaaagttggacgacgacgacgagggcgagaccgaggcgtccgaggcgatcgcagccaggtactgaattaccttcttggtgttctcggtcttgcctgcccccgactcgccgctgcaggacagcggaggccgagattagcccgctgcttgtcgcgcaaggggtaccggcaggcaacgtacgtgatgagcacgctctggctctcgcgcccctcgcgcatgctgatccaggcccgctcggcgacggcaaagatgtggggcgcgttatcctcccgcttgcggttgcggtactgctggacgtgcgcgtccgaatagattggcagcgagcagtaagggttgaccgcaacgaggaagaggcctgcacaaatgcgagagcagagcaggtcaggccgagagcctctggcttgatgaacaggcggaaaacatactcgagtacgtctaaggcggtcggcgaagggaaagtcgtggtggtcagctcaagctcgcgggctggccagagagaggccccgcagcagacgcgtcgcggtcgcacgtagatcatgcccgagacgtagcgttcgcgcaggttgtggacgaccgaggcctcgttgaggtacgtcaggtcggcaatgtcggccgccttgtcgaagcggggcggattcatgtcggacagctgctcggccgggatggtgacgatctgggcgggcgaggaaagacaggcgcgcgagccggcaggaggtcgacagaaggtgggtcgctcggccggttagcttcgggagcaggttgccaatgcaggcgaacacaaaggcacgcacctggccgctaccgctgaggacgacagcccggtcggcgccggtctctttcgagacccagccgcctacgtagccctcaacctcgtcggcgacccagacccatctgcgggcgggagcggcgtgagagcgggcgtcagtcaacgtggcccgacttctccatccgcttacggcagaagcaggacgtacttctttgcaatctgtacgttgcgggccgaggcagagtaacgagggagcaaaagttcagcgtctcgacaggcagacaggcatgaaggggaggctcgccgtccccctctctcggtcaacaagtcgccctccctccgagctcgtcacgggctcgaggccgcgggcagagactcacaaactcggcgtcgccgtccttggtcgtctgacgtttgcccatggtcgggtctggctgcgtagaaaggagagcacctatctggcgtacaagacttgaggcgagtggcggttgacgaccgaggggagctgctaggcttgagctcgaaagaggcggctcgcgcgtcgacgttcggccgcgcagcaagaagcagctcctgtggcctcgacgagcagctcccctcttctcagatcaggcccagtgcaggaagctcagggtgggatatgaggacgtgcgcaagggtcatattgataaaatcggtggttcgcgcgccgtccgccgccagacctcggtcgagtgctggacgcacggccggccgaagatgggtcgaccgtcggcatcgaggtcgggcacgtcgatgagctccttgtgcgtgcgattccagagcccgtcaaggtcgatgccgtcaaagcggtcgtgcgagtacgagtgaacgagccaggtcgatccctctggggcgacgagagcgaggttgcggccgagaagcgcaagcgaatggaggtctgactctgccttgtcgaacggcgacggccacgctggcccgcacgaaagagcatctgacgtggacttgtcgagaatgaggattggccgggatggccggtcggtcgccggccggacaagggcgacgaaatcggccgaggcaagcaggtcgagtgtcgcccagcgcatgctgctgtgaccagatccgccggccagctcgccgaactgctcgtcctcctgtaggcggcccaaagccacggcagcaggggagaagtcgacgttgaggatgcggtccggtcgacagccggccggcaaccagcgccggaggtcgaacgacagctgcgagctccctgagccgatgtgcaggatgtctggtggcggcaccagcggctcggtcgaaccctctgccggcatgacaggacgacgatcttctgcctgttgaccatcgcccgcgagagcctcgagccaggttcggcaggccgaggtaaaggcctcgggtaggccgagccactcgtgtcctcctgccggctcgccgcccttgcggaagcgggcgtcccagtaggcctgagcgtgaaactctggcggcacggaaggcatggaagctgagctggggcaagtaagtgtacgagcggccagtaaagacgacagttgccttgaggtccgggaggcgagagctggagagaggtcggtcgacgggcagcagcgacagcacgtcgagctcttccttcgcctgcgcgtgctcgcacctcctgaaccgcaactctcaccgccctccccttctccctcaaataacaaaaccttgttctaaagagggaacgatggacgacgccatctcgatcaatgccgcctcggcttccgtcgaggaggtcgatgctccggttgcggcctcagcgtgcgtctcgtcggctcgcgcgccagagctcgacctcgacctcgtgtttgaggcgttatgccgcaggaggcccgagctcgctttgtttccatcgacgagctgaccccgatcttgtcctatcgcagattcaacggctttggaaacggcgcacggccagacgccaaggcccggcgctacgaccggcagctgaggtgcgtccttctctcacctggaccgggcgcagtgcgcgcaagatgactgatggctgacgggtccatctcctcctctcttgccgtcggcaggctttggggaagctcaggccagggcgggctggagaatgccaaaatgcttctgatcaacccaatggcgaccggcacgcagacgcttaagaacctcgtcctcccaggtcgggccctcctccggcgcacgggccgcctgcgcgcgcacctctccggcctctgctgacgccagccctctcgaaccaccaggtatcggcaactttgaagtactctcagccgacccggtgacggccgaggatgtcggtcagaacttctttctcatgctcgactcgctcggcaagccgatcgctcaggagacggtccgcttcctgagcgagctcaacccgagcgtcaacggcactgccaaggtcgccgtgcgtcgtcactcccttgagagggcgtgctcgccagaaaacagcgctaacctctttctccgcaggccgtcgacgagctgctcgagacggacccgcgctactttctcgacttctcgatcgtcatcgccgtcaacctgcccgcggcgacggaggacaagctggcggccctgctctgggcgggtgcgtgtcctggtgctctggtgcgctaccctgccgcccctaagctttccgctgacagcagcgctttgaaatcacagcctccgacccgtcatcggacgtcacggcgtcgaacggcgcgcaccccgacatcccgctgttactcgcccggtcggccggcttcatgggccttcttcgcatccagctccgggagcactgcagtgcgtgtcgtcgcggcagccttgcaagagtatcagactgacgtcttcagccgtgcctctgcaccgcagtcgtcgacacgcacccgtcgagcctcgcttcgctccgcatcgactgcccgttcgacgagctcgtcgcccatgccgagtcggtcgactttgccaagctcgagtcgatggagcacggcaacgtcccctttgtcgtcatcctcgtccgtgcgctggcggagtggaagaagacggttcgtgcgcggcccgcggtgcgattgcttcagctgcctcgagcgagggctgacgcgctcttgattccgcctgacttgacagcacgacggccagcagccaaaatggtctggcaagggcaacaccaaggccgagttcctcacgctcgtcgaccagatgcgccggcacggcgacgaggaaaactttgcagaggcgcaggaaaagggctacctcgctgcgcagaagacgacagtgagcccggcctctaccccgatttgccgctccaagcaacctgttgctgacgaccacccatccgtcgccagctgccgcgtgagattgaggagatcctgcacagcgaccgctgcatcaatgttactaaggacgtgcgtccgcctgacagctcaaccgacttttgactggccggtcgctgaccgcgtccctcttcactctcgaaaccagtccaagcccttccacctgctctgcaacgccctgcgagcctttatcaggtcgccatccaacccgtcacggctcctgccggtatcggccgctctgcccgacatgaaggcctcgacgagcgcctacgtcagcctgcagaacgtctacaaggccaaggccaaggccgatctcgaagcgattggccggcacctgcgcgagacgctccgccgcgtcgggctcgacgaagacgctgtcggcgaggctgagctcgccgactttgtcaagaatgccgccttcctcaaggtcatctccggccgcagcctccggcaggagcgcgaggagaccgacttcaacaaggaggccatccgtgcgtgcgctgcattgtatactgatctcacgcatacaactgacacacttgctcgcctggcagtgagcttccacccggacccggactggaacgtgccctatgtcccgccgccgatcgtccagtacattgccttccgggcggcagacatcttccacgcctcgcacggccgctttccgggcgtcggcctccgcgacagcgacggccgcgagcaggaggccgactgcgaggcggacgtcggcgtcatggagagcataacggcaaaatggctcgccggccggggctggagcgccgacgctgacgccgacatgggcgacgacggctcgagctcgtcgctgccaagaagcgtccgtgatgccgtcggagagatgtgcgttcaatgccctacttcttcgctcgagctcaccttggctgaccgagcgactgtctgcccacagcgtgcgcgcaggccggtccgaccttccaacaacggcggccttcctcggcggcgtcgtctcgcaggaggccatcaagctgctgacggtccagtacgtgccgctcaacaacacggccgtcgtcgacatgatccggtgcgtcccttcttgttcgctttaacgccccgctgagtctccccgctaaagcgacgcgactatcagtggcagcacgggtgcctacgagctctgagcgagcactgggcggcaggccgccagtctagatgactttactctttctccaagcttcgcggtcagcctgttgggggctgaattgaccgctgagctcttgcatggctgagtcggctcagactcaggatgggagcatagtgagggcatcagcgcatcgagtgagagcagagaaaagggtatgagtgaggtgcgtgatgtccctccaggaggcgcgcgcccgtcgtataccccaacatagtggaagagaacggctcccgaccatccagctgctcagcagccagtgcaggtcacccctgcaacattagcagcgaattccccgagcatattgccgggctcggcgtagttgcagacgtgcatcttgaagggcgcgtgcgtgtcggggtcgaggcagtctgcaatgccacagccaagggtcgtcgtgcttttccagacgagctgcgtcagatggttgtaagtcggtgccgcaaagttgaaggtcgaccttcggagcaggaggggagagcgtcagatcatgcggagcaagggggacggttctgtcagaagacgcactcttcgccagcccacatctgggcggtggacgaaaggtagcgtcagcgactgagctcaatccggagcaactgctctgcaagcttttacgtacgttgaccgtgtccgagattgagaggtcggtgccggcagcaatgtctgaaagaggaacgaagggtgacgtcgtcagtgagggcagagtaaagaggtctgctgcgggcgactcactctcgccgtacctgttcgcaagagaaggcggcaagtcagtcaatgagccatgagcgtcgagagccgcgcaggcatcagacgtacagatggttgcccgagtggccccagatgcacttctcggcgtaggtctgggcggcagcagcaaccgttgcatcccaggttagatcgacggcctgcaaacaaagaaaaggggtcaaaaggtgtggcctgatgaacgaaaactcaaggtcatctcaccttgtaccgctgccgaacggcgttgtgcttggcgaggtattcgtcgatctgcggcgacgagagggcgccaggaatagcaagagcaggcgacgtaaccaccgcgccggcagaggtggtaatggtcatcgaggccagctcgatggacgtcgagagcaccagggtcgtctacgaggcgagcgggtcagtctacgatgcgcgaaaggaaaaggaaataaggagatcgcacctcgatcgcgcctgaggtgccggcggtcgccgctgctgaaaagacgattgaagcgacatcgaaaccctcgacgacggcgagctgctcagcagtcgaagacgttggggtaggtcccgccgagctggtggtattagacgtggcagcgtccgacgtggcgacgggagtcgaagcagagagcgagctctgcaatgaatgagctcgtagtcagcgctcggccctttgcaagtaagggaggccggccgcacctcattgtcgtcctcgcagtcctccattccgtcgtcctcgaccgacgagggataggtgatggtggcagtaacctacgagagccgagcgggacggtcctacgtcagcaaatggctggcacacagctgatgaggcaggagacgtacgttgctatcgaggaggctctcccactcggtgccgttgcacagagccgccaagctcgtcgacgtcccgttgatgctgagggtgacgttggcgatgctggcagtttcgttgctcaagagggccgagctgcaaagcgcggtcgcgttgaagagcttggtgccgttggtccaggcggttgcatcccaaggtgcggtggcatttgagacgtcggccgagccgttagtctcggcgacttgccgagcctgcgagttgtcaagaggagggggttgggggtcagctctcagtcgcgctgaaagaggaggagctcggcaagggcagctcacgacgcgaggacgagacgggatcggcagggccaaaaccgagctcagcgagagcaggccaaagatgagcgaggccgactgggcgagcatgatggttcgaaaagatgggcgtggaaggaaggtgaggtcgtgtcaagatggctggtggctgagtaaacgggagagtgggatcgaagccggcttcgatcgagggcgtgctgtgaacgagtgtggtcgacgaggtggtcgaggtgaagggcgggcactgccagggcaagctatgggagggcaaaagagacggaagcgaagaaggagacagtcgaagaaaagcagccggtggctcacttgggtcgctcttttgagtcgcccgcgcgccgccgagagaaagggggttccgcagtcttgaaaaagaggggcggtggtggggctgaacaaagggactgaaacagcggatcggcctcaattgcgtccggtcgcgagctgacggcacttcgcggcagagaggatgagagttgcatttttatattcaggatgaggcacgaccagcgtgtcgagatgtgagcagaagcagggacagagaagaaaagacgaagggacgtctagcagttggcgcagatgacgctagcggggcggtcggtggtcgtcagcggttgagcggcactctcgcgcagagcgacaaaagaaggacgcacccgtcgacatttgcccggaagcggcctaggtagttgccggccgggtagtacgtgcaggagaggtactgcgagacgcccgtcgggcccgagccgaaggcattgaagttggtgcctggaagaagaggaggcgttcagcttagacgagggcaaaggaggtcgcgaggaaagtcaatacgcacaggaagagatggcgcagccgatctcccgagtcgacttccatactgcctgggtatagtgggaataggccgggttgttggggtccagctcggtgactgagggaagcaaggttcaaagccggtcagtctgcaagcggcgaggagcagagagattggggcaaccaaccctcatcggcccagagctggaagggacgcaaacttcgtcagcaagcaagccgattgcagcggatagcagcaggagagcgcggcgcacttggatcaaaccggcaactgagttgccgccgccgtagccagccgcgaggttctcgccgtaaacgaagggcaggaggacgccctggctgtgctgccagtcgcacctacaattcaacaaatcaaaggagttctttagttcattcattcgcttcaagcggagcttgctgctgaatgaacttaagtcacaacgtacttgtcggtccactgctgagcggcatcagcgagggtagcgttccaggtctggagcgagcggcgagcaacgaagtcagggccaaaaagagtattgccagcacacgatgagcacgcacgagcgggccggcgttgtgcgcggcacgaaggacgttgtgggcattgacagcaacggtctggaggtcgctcgcgacggcggcggcctggatgggcgacgagacaggcgcggccgaaacgacgctaaggcgaaaggtaggcaagtcagaaccaggtcagaccggcagcgctctctagcttcagacctacgtctgggcaggggcaacggccggggtggtcgaggtcgtcatcgccgccttgctggtcgtcgacggggcggcggcgacgggcgtccggttggtgctccagtaccacgtccagccggcgcgagcctgtcgtcggcagagaaagcggtcgtcagctacgagcaccggtggaagcagcagagcttaagcacgagggagtctcacctgcagggcatccccgtcggggccgatggagacggcagcagcgggtgcagcaaccgcgaggccagcggcgaggagggtggcgacgagtgacgtcttcatctcggcgaaagaagcaagagaagagaggagaagaagggagacagcaaaggaaggtcggtgtcgggtggacgtggaggaagggccggttgctggagtgagcaaagggctggccgagagtgggctggatcggagctagcagacggggttgggtcggggtaagtggaagggaagaagcgacgcacatctcctcggcctgggtcctttttgtaggctgctcggcgtgcgagtcgcttctcccgcctgacctacgcagggcctcgtgtgaaagagagggtggagaggcacgccctctcttcacctcaccgcctctcgtcagacgacggccgacgatccctgtcggcctctgtgcccctttaagccgggccggcaaacgaaccttggccaacgcccgccaccccgcagcagcagcaggctggccgaacctctgcgtcagcttggcagaggaccggtcggcctctgtgggccctgggagagagggaggatgacgatgagagtcgatggaggtcgggcggcagcagcaagccgaagaccgatcatggctgcgagcgaccaccgacgtcgacctgccacctcctcttcagccatggacctccctcagatcggagcacattgctccacctgtaggacgctcgacctcttaccgatccgctgcccgtcttgcaatcaggttcgtgtcgctcgcctcgctttgcctcgcagcagcgacccagccgctgacgggcctcgaactcggcctcagccagatcttctgcagcgcccatagcccgttcgcctcccatggctgccccgagcccgtagcggtgcctccaagcgcaggcccgtcgtcgtcgtcggcccccgcagcggcccaaccatgcgagctgcctggctgcagcaagccgcgcctcgtcgtgtttgatctcaagtcgggcgcgacggcggttggccgggacgtcgcctgctcagcctgcgccggctttttctgcctcatgtcagtctttgccgtcgctctgagggcagtcttgcgtgggatcaggttggctgacgctttgctgggcttcgttcggcaggcatcgtgcggtacatgattgcaagccgctcccgccagccaacgtcgccgcgaaagctcacacgcgagagctcatccgctcgacgtacggcgcctcagcctcccacccagccggcacacccaacaagccgtcgccgcctgctcctgctcctccgccggctaagcgagccaagaaggccggctcggcagcggtcgagctcatgcggctcaggcagttcagttcgccgggcaggggagaggtccgcgagcgcgccgaccggtggcaccttcggatcgaggtcgacctcaaggcagcgggctcgtggaccgatcctgcgacgagggatgctgaccggaagcttgagggcacttactggaagaaggtacgccggcgccctcacgagccggtcattcctcagtcagcgcttccgagttgctgaccggcgcctctcctcgcgctccttcaggacttgactgccggtcagatcaagcaggcgacgatcacgaagcacggcattccttacgatccagtcgccggcgactcatcctcggtgcgtgcatgcagccgtccagccgcagatgttcctcgcgctgacctcttccatgctcgcgcagctcatccacctcttgcgcatcccgccagacggaggctcgcccgtcgagctggcgtcggcagcggcgatctcgagcgcatgtgaggacggggcttgggttgtcctcgtcaagggtggcgactggcaagcgccctgatggatgtcctctagcgcagcccctctcttccgccctggcgttgcaggaagaaccgtccatcgtcatcgaccgcagtaacgccttcctctcgcatcaaggctcggcctcgacgacaaagaagttggcgccgacaacctttccgccgccgaggacgtcctgcgcgaacgcctcgacgttgaagcgccggcgaccctcgggctcgccgttccgcagcgggtggtcggccggaaggtcgagcttgccgtttggctgagagacaataagccagacttgagagaagccggggacatggagatgtcagccggtcgtcaggtttgcagacagggagcgaggaggtcagaaccgaccgtaacggtgggcgccgctgcctttgccagggccgggcgcgcgccagggcatgagatcctcctttggaagctcgacaatcgacggctcgccttcgctggccgcgctgtcttccgcctgagcagcgagctcgatcagccggtccggcccgagcgcgcggacgttcggcttgatgcagtggaggaacgagcgcgaggtcggcgaggtcgccgacggcgcgtccggatcggcgaggacgagtgtgaagagctccgccgggtcggctacgaacgcgaccgttgaggggaagcgcgcgacggactcgacggcgagcgtgttgccgagagcgacgacggcggccgggctgaaagcaagcttgaggtcgactggcagcgaggtcggagcggcgccagaggggaagacgccttcgagaaggccgggagaggccttgaacgcgtcgagcgccgaagggttgaggagcggcatcgtcgagggcaagagaggaaggctgcaggggcggggtctggctatgtcgctagagctacaggatctctgaagcgaagctgagtgattgatggctaggaggaaggaagcaaggaggtcaaggccaaggtcgagatggggtgaccggccgggccgggcggcgggccggagctcagccgggcgaaccgctgcgcatcctcctctgtcggtctagcttcgcaccctcgctccctctttcaactgacactggatcgaagcctaagtttcattatttctgagcaggccccaaaggtcaccggccttatgcgtggttctcgacagcggccgggacgaggctcgtcgccgtctcggttgcggcgggcagggccggcgcagcaggcgcagcgacagcagccccggtcgatgcccccgaggctgaagcggccgcaccagcagcagcagggtcgacggcggttgcattggtcgggcagtcgcgggcgagatggccgacctcggtacagcggtagcaggccttgggcccgcgcgagaccgagacgggcgtcgggcagtcgcgcgcaaagtggccggtgccgttgcagcggctgagaacggcgacgaaggcgcgagcttgtcaaccggagtcactcagggcaggaaagagaggacgctaggagacgcactagcactgcaggccgagagccgcacccgaggcgctcgtgttgaccatccggcgagggaaaccgccgcccatcggtggcggacgggcgaagcctcctccggcgccgttgacctgagggcatgcgcgtgcgatctaaacagggcaagagtcagactgaggaggcaatgtacgcggtgcctgaggcaggacgcacgtgacccgggaagccgcaagtctgaagcaacgagatcgacgcagcgagccgaagtcagctttactcgcacgacgcatcggatatcgaacacggccagggtacgacaactcacgtagcaccgggcgccgccaacagcggcggcagggcccatgccgtagccgccaggggtactcgggcaattcgaggaaatgtggccgacgccggcgcacgagtagcactgcttggcttcggtcgtccgagggtgagggcacgcgctcgactcgtgctgtggagagcgagcggtaggtccggcaggcggcgagatgattaggtggtgcatgcgtcagcgtgctgctgcttcggcgagcccagccagagatggaagcagcgcacgtcgttcgcccggcagttgaagcagacccgggtcgggctcgagcaattggcggcaatgtggccgaggttgccgcactggcgtggagaggtgagagggcggtcagtcggtctgagcaggtgttcatatgcctcgcaggccgtcggtcggccgactcacgacgaagcagcctgcccaccagagccccgattcaccccgccgcagcatcagtactcctctcatcctctctcacaccagctctcacacacgcgtggcccgaggcccagctaccgacctttacgcgagtacgacattgggggccttgtatgaaggaggagaagctgaaagggggtgaagaaggggagacggcagggaggtctggcgggcgaggaagaaccggccgagaccggaataggcatgaaagaaattagctctgcgctgactttcgatgctggtgaagctgagcttctccgaagtccgtaccttgggcaagcgagctgacggtcgacgatggagggagaggcaaccgacccgggctcgcggcgcgacgagacgaccggcggtctccctttgctcctgcatcgccttgatgcgaaacggcggaatgaaattggtgccttgaagctcgagctgccagggtcctcctgagctgctcctccaaacgacctctccctccagacctcacaccccctctcagctatgtcggctgctctgggcaagcgcaagcgcaccgtcgtccccggcggctcaatcgtcaagggcaaggagagcgcgccgaccgtgtcgttcggcaacgccgtccagttccgcgaggccctccggaacgaggacgccgacgccgttaagggtggtgcgtagcagcgagttgtcggctcgagcacgctcctaaacaggactgaccttgacaacttgcgctctcagccctcattgcctttcgcagccagatcgccgtccagctcgacgaccacccgctgccggcgaccgacccaaaggtcaagcttgtcgccgactttctcgagcgctcgcccggcgccgacgacctgttcgacgcctgggatgtggccattagcgtacgtcttgcgactacggctggagcaccgcgtggcggccatgctgacctatgcttctcgcatctcgcagaccaactcgcaagcgctgctgcccctgccactcgctgttctgtcggcggtgatcgcgctgcttgcgccgctgtcattcttccatccccttctcgccccggtcctcacgcggctcctgtcgccgacgattgctcgctcggtcacgcagtacatcactagctcgcgctcagacctgacgattgtcgccctccgcgtgctcgtcgagacggcccgggtcggcgaccgctgggcggccaaggtgtgggagacggtcggcgccgcccacggcggtccgcaggccaaggtgtggggcaagctgttcagcatgcggcgcaaggaggagaagggcgtcgccgtcgctaacaccaacccattcagccggcccgatattcggacgctcgccgtctcgctcttcacaacgcttttgacggccggtcacctgccgaccaagctcggcatcctcgcccagccatcgctcatttacggcacatccaagctgctcgcgtcggaccacccggccgtcgtcgagcgcgtcctccagacgtggtgggaggtctggttcaaggagaagcggatcccgcgcgtcaccaagctgccggcgttcacgcccgaggtcatcggcgacatcctcaaggtctacgtcggttccgacgacgacgtgacgaccaaggccgacggcggctacactgccaaggagctcgcccaccactttttgctcgccttcctctcgttccccggcaagggcgtctgctaccaggacaatggctggtacccgcgcaactttcacctcgacgcgacggccgaggagctgctcgaggacgccggccgcaagtcgggcggcggcggcgtccacaataaggtcctgaaggaggtccttcgcggcgcaggcacgctcggcctcgtcggcgaagacaagcaggccgaggcgctcgtcgtcgctatcctcaagagctgtcccgagctcgtcgccggctactggtctggctcgggcatcacgctcgacccccggctgtcgtccaagtttctcatctcgagcgcccatctctcgacgattgtctcgctccccgtcccggtcgattgctttgcgctcgcgccctcgctctcgtccgagccgtcctcgtcgacctcagccggcccgacgcagtaccgttttgtgccgccaccgctcacgtcggtcatcgagaacgtcctgccggccatcttcccccggcactactcgacaaacggtctccagtcgcgccatccgctcgtccgtcacacgacggcgacgacactctcgcgctgcctaactaagctccggacagtcctcgacgccttccagcgcgttgcgaccgagctcgaggagagcgagactgggctctggacggcccgtcgcaaggagctcgagcgcgaaatgcggcagcgcgtgccggacgtgacgactgtcgtcgactttgcgatggacgccagcaaggtcgccgagggcgccccggtcgaggaggccgcccaggccgcggttctgaccgagtcggcccttcgcctgctcggcctctatcaggcgacacttccaggcttgatcgccgaggaggctcggtttgatgtcggtaagctgctcctgccatcagccggtggcaagggcaagggcaaggaggacgtcgatgccagtgacgacggctggggctttgccaagagcagcctcgagggcgtcgccgctctcagccagctgcacgtcctgcgactcctcggagagggcggcgacttcctctggggcgctcgggcgggcgcctcgccgcacacctacatgtttcacctgctcagcctatacctcacgacgccgcacccggcgacccgagcaacgacggccgccctcgtcgccaagctcctcagtgcctcagtcctcttcgagcacgatcgggacgaagttgcgacgtggctagcactcctgctcacctccacccgatcctcatcgacgccggccgaggccgatgcggtcaagctccaggcgatcctgacgtttctcgacgactgcctcaagcgctcgctgaagacgccgtacaagtacctcgaggagtcgctcgaatttgacgctgatgcggccgtcgccccgcaccactcggagatgccgtcgccgctttttgcgacgctgctcgagcagctcgccgccaagatcaaggccaagctgctcatgcccgacgaggtctcgaccgtcggcggcttcataggcggcctgatgctggcgctcgcgacgaagcagcggacgctcggtcatgcgttcgaggccggtcgccgactcgatacggcgctcgccgctgctggtctcgacaagagttccctggcgaccgacctcgaggctctcgcggccgctcgtatcgttgctgcggcggaggccgctgctgcagcggaggagactactcgtgcgtccactggtcacggttttctgtgagagcgtatcctgacgtctctgggtctcgatttggcaggcgagaacgacctcaaggtggcaaacgcagacctgcgcgacatttcgacatgggcgcggctcagcgggccgcagctccggcagccgttgcttgccctgatgacggatgatgccaccgacgaaggatcgtcctctttgacgtccgttgtcgacgtcaatacgtcgatggagagcctcgtccggctgctgtcggcctccaaggagctcgactcgataaccctgcaagcggttgaggctctcagtatgtctgccctctcacggtctccttgttctgaaggcggcgctgatgaagctcgcatcctccgccccacagggtctgctgtcgaagctctgccaaaggagccgcccttgaatgctggcctggtcaaccctctcttcaccgtcattatggaggatcatgcgtcgtctggcgctgtcctcaagctggtgtgcgccatggcgcctaggaccgtcatgaaggtgagtctcctattcaatctctccttaccattctctaacccgtgaatacttgtccctccgcagccggctctcgtcgtgcggcatctgcagacgctgctcgctacccgtgcctttgccaacctctcgcgcagctcgccactgcgagagtccatcctgctcgtcatccgagcgctcttcgacatgtcgcctgcgacctgctgtcagccagtccacattgagccgctcgtcccgatttacggaggcagcatggacgtcgccgaccggacactgctctcgatcttccacctgttcgaacgtcaccgtcgcatctcggtcgccacgctgctcgccacttggtcgcccgagggccccgacgctgctggcgcaatccgtcgggcgctcgacattgttcttgcgctcgacccgcggcgcatgctggcctcgtgcagcgacttcccgctccgtcggtcggtcgacctccagagcgagattgctgccaaccaggcctacccggatgccgacgaggcgtacgacccggtctatgttctctcggtctttgcgatggcgctcgctcaggccagcctcggcggcggctacgagctgagctcgctcgactgggtcgaagtgctccggagcaacgtcctcggccttgccgcttgcgcgctctcgtcccgcatggccgacatgcgcgagctcggctcctttctgctcgccaagtcgttcgccatcatcaaggtgaccgactttcaggagcagacgcaggtcctctatacgctcttcctcctgcggcacgcttgcccgcctccgacggcaccctcgcggacaccacaccgagcgccgagcatgatcacgctcttctttgcgcacacgctccgcgcgatcggcacaccgtcgtctttcctctacccggcgacgagccgcttcctcctccagcggccgcaggtggacgcgggcgatgtgccgctgctctacagcacactcttttcgagcgacgacgagtggaagcaggagcggggctggatgatccgcctcgtccgagacggcatgcagtcggcccaggtgcggtgcttttcaatgacgacgagatcctcgctcgcccgtccctccttcgccgttcgttgctgatcagtcctcgccttttaccctctccaccaggactggcgcatcctccagcgccggcatacgttctcgctcctgatttcgctttaccagtcgaccgcggacgctgtcgctcagcggtcgatcgtagaggctgtcgccaacatgacgcgcaacgcaactgcctgtgctggcttggtcaggcgcgagggcctcctgccgtggctcgcgatccagctcggcgcgacgacgggtggcgatctgtcggctacggtcgacgctgacgccccgcaaacggccctgctcgaccacaacgccgcctcggcctctgcggtcgaccccgaagtcgtctggctgcggcttgccgagaacgccgtcgtcaacgccggtcttgaggacgccgctcgcgccgcccgcaagcccgacaccgtcatccgggcagcctggcgggccgaggtgctcggcctgctgctcaaggcggtccagtcgtcgcgtacgtgccctctttctggcaaggtctgggttgctcgtcgctgacctccctggccgcttcccttcttctctcagcgcgacttcaggtcctgcacaccgctgcccgcgtcctccttcgcctctcgctgcttccaccaacgtcaaccgagctcacgccgtcgttcgccgccgtcgtcgaggccatcctcgccaagctccaggtggccgagccgtcactcgcacgagttacgggaccctcgcaggacgtaatgtcggctgctctctggtcggcgaaggacatcttccggccgatcggtctgacagctgagcaggcttggagcgacgtcgtcgaaaacctctggcgggtcgcgctctcgctcgggcccgacgttgcccacggcggggttccgacgcagacgatggaggccctgagcggtcgggttgctgtaggcggcagcgcaagtgcactcagcaagtgggtccggcgcgagctgagggccgtcttcgacgcgcaagctgcgctctgataggatggctgctcacaataaagaaagtcttgcggtcggtcgggcttttcgtggggtgttacaagtgaggccatcgtagagagaacaagtcgtaagtacagaaggtagaatgagaggggggtggccgagagcgtgcagatgcccggcaaggcgaccagatcggagagggacaaagccagaagaacggagacagcggaaggaagcgggcggaaccgaggacagattactcgagctcctgaacgacagcgacttttccacctttctctttgatggcgactttggccatccgctttgacgcggcgaccgggttgggcgacgagtagatctcttcgagctgctcgagcgtgcgaccctgagtctcgacgcagaagaagtaccagacggccgtctcgacaaggtccccttttggcaggggagcgcagaaaagatcagcatcgcgcgtgtcaagaggaaaaacaggaggagaacggacaaccgcagaagacccagacgtagttgttctgaatgttcttgagcgcgatggggccggcaaaggtgttgatgaagcctagagggagggagcgagcaggggtcagtcagccacagcaatctggcatcgagagaacgagagagagcggcgcaccgatggcgttgacgatgacgcccgacatcgacatgcccttggcgcgggcggtcgactcgaggttctcggccgggtagacgccctggagcggcgtgtaggcaaacgagaagacaatgttgaagaggctggggaacaagggagaaggtcagcatgaaagacgtccagctgggagccaggcgaacgcacaagtagaaggctagcgaggcctggccgatggcaaggttggggctgatgaactcgcccgcggcattctttgcctggcgcgaccagacgagcgagagcgaggcgttgccaaagaggcagagcgagcagacaaacgttccgatgatgagggccttgcgccggggcatcgtgtcagagaaaccggcggcggtgacggcggcgaccgcagacagacactggttgaggaggttgaagccgagctgggtgacgctcgaggtgtagccgaggttgcggtagatgaccgtctgaaggaggggagggcggggagcggatcagcggcctccaaggaaaagtccaggttcagcggggggaactgacgttgaagtagccgaggccgttgccggaaaattggccgaaaatcgagatgaggaggaccatcgacatgcgccagcgggcattcctggtccggaacagcggccggtagtcccaccagaccttgtcagcgccgtcgagcttgatgccctcggtaaactcctcccactcgagcttgacgagcagcgagtcgggattgttgccaccgtggtctgcacgcgagcgagagggagagtgaggaaggtcagccaggacgacccctcttgagcaagaacagggaggacgcacacttgacgaggaaggccttagcctcttcgttgcggccgcgcatgatgagccatcgggggctctcgggcaggagccagacgaggcagacgacgaggcccgacgggacggcttggaggatgagcggcaggcgccacgagaggttcgaggtgatgtagttggttccaaacgtaacggccgccgcggggatagctccgccaaaccagccgcagttgtagataccgaccatctttccgcgccactggggtggggcgacctcgacgcagtaggcaggagcggcgcagctgtgagtcagggaaggtgagaggttcagcaagagggctgcatgagagagtaaggcaaaaactcacgtcatgatcgagatgccccagccgaggatgaagcggccgacgacgagctgagggatcatcttggccgacgagatgacggcggcgccgaggatgatgacgagtccaccgcagaacctagggagggagagagaggtcgttccgatcagtccctcaggagactctcttgtcagccgaccgctgctcgagctcacattccgatcttgcggccgaagcggtcggcaatgggaggcgcagagaaggcaccgatcatggcgccgacagtgtagatcgagaagatgagcgagacggtctggtagtgagggcaggctggtcagcaagctgtcagagggtgaagtcagtaagcaggccgtactggtccagtgtcgcccgtcgcgaactgagtttggaactgtcgaagcagaagggcaacgagtgaggttcggttggctggctggatccgattccgactcgtaagaagggacgtacaggagccatggcgatgagagccgtcatgagcgagccgtcgtaaccatttgcgcaggcgcacaggaacgagacgccgcagcagaggtagagctgccacgactcgcgcgagcgggggttaagccgctcggccttgatggcggccgcgtatcgggcgttgaactgcccaggtgaggcgagagggagggtcagctgctgtgactgctgttactgccggagctagccgaggcaagaaaggagagaacgcacgacctcgacgaccttgaggtcgacaccgccggcggtgacgtccgggagctcagcgaactccttgtgctcgaccgaggcatcgtcctgcttcttgatgtcgtcgtcggacgacgagaggcccgacaggcgggtctgagcgttcgacatcgcgcggagagagggctgtgtgggatcggtcttgagaggggccaggagaggggaggcaggttccctagagaaggaggtcggctgctgggtggtgtgtggggaagagggggcctactcgactagagcctccgtcctggccctttatgtatggcgaggacgggaggacggcagacagcagggcctcgtgggcagcttccgtcgcttcgttccgaagttcggccgtgcgggcgctcgctcgcgggtcatccccaagccgggaaaaaacaagggacccgcgggcggtgcgctcgctcgagacttcccagccgtttgtggctcgagagtagagctcgaggcttcagctgtcgaggtaagacgcgagcacaggcgaaggcgagctggccatagaggttgttcggaagggggagggctgaaaggaggaacgacgcggcggccgcgcgcgcagcagtcccgccctgacttccctgcgcgcgggggcagtttggcttcgacgcctgctcgagacggaggcctgcctgccggacggggatacatgggcggcgatcgcattcaacgcagagagaggggatggatgcgagaaggagccgccgctcgctcgagagagcgcgttcgccgacgggccgccgccgctcgctcgctcgctcgatgaggggctcgatccctgctcagccctgcagtttcgccccgagatggccgcgcgctgcgacagatagagacagctttccgttgagccgtcgattcgccgcactcagccagtcggaaggacaaagctccaaagcatgtcgtcgagcaacctgctattgtcgtcgtcgtcgacccgtgtcgtcttgccctctgctccgaaaaccgacgtcctcgtcctgtctccagcgatgatctgccgtcgacgacctcttccttgtcagtcgctcctcccgacgacagcccgctcccgttctcagcttccgaggtccacagccagccatccacatccgccagcctggccgagctcggaccagcgtcagaagaaaaggaggttgaccatcgcagccccgacaccctgcgcccggccagacgaccccttacctcaatccctcctgttcgctccgcaccggatcaccaagcgtcaccgacgacctcgagcctccgcctgatccacccaaccatctcccctctctgcaccagctcgccattcggtgagctcccgccctcacccccctccgcctccgccttcgcgagctcctccttcgtccgcgtctggtccttgatccggacggtgcccgatcggacctcgtcggcgccaaggatgacggcaaacggaatcgactccttgtcgacgacgtcaaactggagcttgatgtttttcggcttggtcttgtacatgaactcggcctgcgattcgagggagagggaggacgcgtcagctaaagcgcacccactcagcgagcgaagagcgaagggggaccgacggcgatgcctgcctcccagagctccttgcagatctgcatgcgctccttgatgagtccctcgccgaccgagacgacgtagaccttggtctctttgccgcgggccgacttgcccgtcgcgcgctcgcgctcggcctggcgggcgagcatgctgcgggcgggcagagggtgagaaaaggagtaggtcagccccgcccttcccttattttgacgcgggcagtctcaagtgcgaggagagaggagagacgcacatggcgtaaacgcgctcgacgccgaccgacacgccgacgcacggcacccgcccgcgctccatctccttgagcttctttttgccctcggccccgctcgccgcgctcgcaaacatgccgacgaggttgtcgtaccgcccaccagcagcaatcgagccgacgccgacggttgactcgtcaacctcgccctcgaccggcggcttcgggcatggtgccgccgccagcgagacagcggcggaaggaggcgcagagtactcggtgacggcctcgtaaatgatgccggtatagtagtcgagcccgcgcgcgagcgagaggtcaaacgacatcttgccgaggcagccgtaaacctcgaggtattcgaagagaagccgcatgtcggccaggccctcgctcgcgagcgtgttggccgtgagcgtcgcgtcctgctcgagcttcgcgaggagcccaaacccatcgcccttgagcttgacgtattcgccaatccggtccgcgacggctccgtcaagccccttctcatcgaccatctcgcgccggacctcgctccagggcgccttgtcgagcttgtcgaccgccgacgagatcgcccgcgtcttgtcggccggcacgccacagagcgagaagatgccgtcgaggatcttgcggtggttgagcttgacagtaaagtcgccgatgtcgagcttggagagggcctcgcagaggatcgcgagaatctcggcgtcggggaccatggcgtcgtacgagcccgcaatgtcaaagtcctggaaggtcggcacgtggggcgtcaacgcgcgtgcttggatcaacggagcggcctcgcctagggaacgcacgcattggtagaactcgcggagccggccctttgagatggccggctggtcacgccggtagaccttggcgatatggtaccgcttgagcgaggtcatgccattcatcgcgaggaagcgcgcaaatgggacctgggtcgaagacggaggaagttgggggggggggttaggtcagaggggactgcgcgcctgcgcccgtgagctcgccggcgcggaaggagcagggacggaccgtcaggtcgtagcggagcgagcagagctctccaccctggtcctgaaggtcatagatgagcttagagtcctcgccatacctgttgccagaggaggaaagagccaggccgggtcagtcggcgtcaggaaagggtgcgccttcgtcgcgccgcgccctggcgaccgcgctccttcttcccctcctagagcatgcgcactgcccagcacagaaccgagccgagccgacagagagcgcgcagtggctcccacgcaaagtagggagaaagaccgagcgaactgactttcccgagaggatctccttgagctcaaagacgggcgtgtcgatcgtgctcgcgccgtgcgtctgaaacacgccctcgagcgtcgaaaagatgcgcttgcggatgacagtctcgtgcgggagaaagtctttggtgccctgtggacgaataggacgggcgaagggtcagcgaggcaggacgttagcagggcgacagaggaggagcaggcgtcgcgcgcgggggacggaccttgggcactttgagcgtgaggcgcgacgacggcttcttctcgcccgccgcctgtttcttcagtccagccccagcaggagcagccgctgctgggtcaacctttggcttgagcgccttgagcgcggtcagctcggcgagctcggtcgcgatcggctgctttgcgagcttgagttgccgaatgcggtcgccgacctgggcgatctgggcgtcgaggtcggcgggcggcaaggaggaagaggaggacatgcgggtggctgcgagctgaaggaggcgacgagaggaggaaggcagcgggcggagtgcgcggagcatgcagggacgtcgtctgagagcagcgacaggtcggggtcgtcggcgtcggcgtcgagaagggcggcaagttgcatctgcgagttgactcactcgtctgcccgcgtcagggccgatcgcttgctctttcgccctcttcctccaccagccagccagccatgtcgtcgtctctctacgtcgctccaccagccagcatgcccctcccgccgccaccgccgccaccgacagcctcgtcctcggccattgagcagtggatcaccgctcatcgcaaggccctcgcctacacggccggcggcctcgccctcgtcggcgctggcgtcgccggctaccgctactatgccgcctcgcagggcgggcgcatcaccctgggcggcgctgacgacgacgacgaggaggcgaccgttgaaggtggcgcatcctcgtcgcccgcttcggctaaggacaagaagcggcgtaagaagaaggcaaagggcgccgagaagaagggcgtcaacgacgagggcgggccgctcctcgaggaggtcaagccaaagcaggcggccgccaacgacgacggcgcaaagtcgccggcagttgacgaagacaagaaggacggtgcgtgctggctcgcctggccttctcccgacctcctcggccttttcacaaccggcgcttcaaactgaccctggccttcttttccggcttgcctcctagaccttcccgccgccctctcgccctccgacatcgaggccatgtcgatcgccgagcggacctcgcttgcgacccacctcaagaccaagggcaatgcgctcttcagcaaaaagagcttccgcgaggcgatcgagtgctactcgcaggcgattgccgttagcccgagcgagagcgccgtcttttactcgaaccgcgcggcgtgtgcgtccccttccgtcctgtgtctgtgtgggtggtttctcggatggctggaggactgacgtctcatcccgttctgtgcgcagcctacaactcgctgacgccgcccgagcacgacaaggttgtcaccgactgcgacgctgccctcaagctcgacccggcctacatcaaggcgctcaagcggcgtgcggccgcgcttgaggcgctcgagcgcgacgaagaggccattcgcgactacacggcggtgacgctgctcgaggcattcgagccgccaaagaaggttgcgccgggcaaggagaacgagacgggcgagcagctcgagcgcgtcatcaaaaagacggccgacaagcaggctaaggagctcctccggtcgaggccgccccagctgccgtcgacgacgttcatcctcgcctaccttgacgcgttcaggccgcacgccgcgccggccctgcccgagaccccgacgacggccgatgagattcttgttcgggccttccaggcgctcgacgcccaggactatgcccacgctttcacgctcgcgcaggaggcgctctctcagggcattagcccagagtggaaggagggcaaggccgaggcgctcaacctccgcggcaccttcaagtaagttgccgcctccccttgtgagtgatggccgccgcccagtgactgaccaccccttctcgccaggttcctcatcaacgatcgcgacggcgccaaggccgactttgaagagtctatcacactcgaccccaagctgatccagtcgcgcgtcaagctcgcctcggtccacatggagctcggcaacatcaccgacacctttggcgactttgaggcggccctcgccgaggactcgaccgaccctgacatctactaccaccgcggccaggtctacttcatcgcgggcgagcttgacaaggcgctcgacgactacacgaagtcgtccgagctcgacccggccttcatcttctcgcacatccagaaggccgtcacgctctaccgtcagggcaagacggcgccgtcgatggccgagttccggcgcgtgctcaagcagttccccgaccggtctgagccctacaactattacggcgaactactgctggccgagaaccgctttggcgacgcgctcgagaagtttgagaaggcggtcgagattgaggccaagaagtcggtcctcgccgtcgtgtgcctgcctgctcgtgacgacggccactgacacctcttttcgtcctccttgctccaggggcggtcggcagaacgtcctccctatggttaacaaggccaacacggtcctgcgcgagcataacgacctcgccggctgcgagcggctcgtccaggaggcgctcgcgatcgacccggactgcgacgtcgccatcatcacgctcgcgcagttgagcctccagcagagcaagattgagcaggccgtcacgatgtttgggcgcgcgcgcgagattgcgcggaccgaggaggagctcgtccaggctgtttgtccccccccccctctttcccctcttctttcgctctgtgctgctcgctaacccggccgtcttttcccgtctggcagattacctttgagcacgcgaccaaggcccaggtcaagttcatggagtcgtacccggagcagcacgccaagttcagcgccatgatgaacgcaatgcaggcccagcagcagcagcagtagtagagcggaattctgcaccaggacctttgttggttcgctcggtcgctcggttgccctcctccaccaaaatacgaaaagaaaactctgggctggcggctaccgccaacgccctctcctcgaccgactgtatcttagcctgctgcgttgcttccgcattcttccttcggccccctcaccgctccgtctcccctcgtgtcccgcctcctctgatctcatgcgacgttgacggttccatgacgcagatgtacggagagcattaatttaggcgctcgaggcggcagctggagagagaggcgaacggaggtggacgagcggaagggagtacaggccgacgtaaggaccgtggcaaatgaagagggaagacgaaagccgagggaggggcgaggcctagagccgatggcccggtagccaaagccagaccatcagcatcgcgaccgtcgcgagcaggatcaagctctcgagccagacgctccgccggacgaggagcgtgcggacgtagcgctccctgatggcaatgtgcttgaagggcgtcgtctcggaccggttgagaaggaggacgaggagcgggtcgagcgcgtagagggcagagaggaggaggtgggtcgcaatgtagaaagggacgagcagctgaagcgaacgacagaatatgggtgtcagaaggcgtgaggcggcgaggcgagacggtgagggcaggacgcaccgtcacgcgcagccggcggggctcgatgtcgaggaagatgaagcagaaagcagcgacgaggcccgcccaagcaaacagcaagcccagcagcagcctcaaaaagctcgtgaacggcgagaggttcgagaaggcctttgcgcggaggaagcgcggataggcgtcctgcgcgaggacagagtgcgcataggccttctggttgagaaacatgtcgggcacctgggcgaggatcaaggcgtcctcttggaggtctgtcgagtcggcgtgcgagagcgaagctgggagcgggaacggaggcggccggagcgtcggcctggttggagcgaggcggggcgaaggtaagaggccagtcggcgagtgcggcgacgagatgctggggcagggactcacggcaagtagacctccttttcgctcccaggcacgaggtagcgtgcatagatgcgctcggcgctcagcaggagctcgcccttcgtgatggccgatgtccgggggatgactgttggcgcccgcgacgcccggcgcttctcgcgcccgctcccgctgccggtgatggcgttgacggtcgggccgccgatcccggcacccgtcagaccgagaccgctcgtccagcctccgccgccggagaggcgctggggcttctcgccgccgccctggagcggagggaacgagccctcgacaggcgagcgctcgccgctcacccgccggacgttccctccagccttctcgtcaaacggccccgcagcagaatagctcgacggctcgcccgcaaacgcgggcccgcgctcctcgctgcttcgcccaccggcgctctggtggcccgagagcggccggccttgctggtggtacgactcgcggaccttgggcgtgatgcccgccgcgtggtcgtagcctgagccgtgcgtcagcgcccggtcccaaaactgcggccactcggcagcaagcgaccggccggatttgcggatatcctgcgaggcaatagagcaggaggattcgtcgtcagctgaggtcctgcctggcaagaggtgcgacggccagggtctgagcgccgcggtcgagcgaggcagccagcgtacctttaagtaagcccggcagaggttctcgtgctggtggacgtcgagccagaagtcgagaatgtcctcctgtccttcacgctggaggaagatctgttggcggcggagggggggaagggaaggtcagctcgcagcccgtgcgagacaggagagggagggcgggtcgtgcccacccgtcccgttatgccgccgccaccgcttcctccgccaccacagccgccggcatccagctacaaagttgcacgcacgtagaagcagaagaggtcgacgggcggcgccgtctttcgcagcaggacttcgtcgagcgtcggcaggcggttgcggaagccgttctgggccgacggtcgcgcctggacggcgtgctggctgtagtcggctgacatgctgttctacggagaaggaatggagaacgggtccttgatgtcgggctgctctgtctctctctctagccttgtccggtcttgcttggaggatggtgtcgactgctatggccgtcaggaggaccagagggttgcgctcatccgccgcgcgtcttcgactccgtcaacatcgaccagctcgacaataccgggccagctcgccatccatagcctacgccctacgtcctcccggaactcgtgcccgtcgcagccgaataggtcgggcctcagatggcagcggccccttacggccctgctgctgcagcagcagcagcagcagcaggcggcagcagctcgagctcgccgctcatgcgctccctttcgcacctgctcaacgcccagacgcccgagcttcagacgctccactcgctgctcgacctcccgcgcgaccagatcgcgctcgacctcagccggcttgaggacgtcctcaaggccgagctcgagcggattgtccgcggccgggcggacgaggttgcgagctggcgggcacgcgtcgaggcggtccggcaaggtcagtcgacgtcttgccatccgaatccggttccgcttagaggctgacaggctgtgacctcccctctcgcgcgagaacagagtgcgccagcatcggtcgtgcagttggcaaggtcatcgacctcgagcagtacgttcagggcgtcgaggttcgtcccggagccgggggctgccgctgtcgccgccgacgcgtctcagccaacacagtcgggcgtgcgctgatggcgagcgctgccctctctgctcggtcgtggccagatactccctcgacggtttgccatcctcgagaaggtcctaaacgagcagctcctgccggtctaccgcgaacggttgctcgtcgtcgagggtgcgtctcttcaatccagcccggtcagcgcgacctgcgctgaacgacccttgcaccactgatctttgcaaccaaccccccgcatcccctctatagagctcacggccaagcttgcacacctccagcaggttctcggtcaccctcccgacctcgtgccaaaatatcagcccgcgccggccgccagcgcgagcttctcggccgagaggctctttggcaggccgaggccgatcccgctcgggccgtagcgagcttcgcttgtgcttgggaagttggcggcggcggcgtgtcccgctcacgaggaagcgccggctccgtcccccacggctgcacacgagctgacgcctacggccgtcgtcgagtcttctgcgccggtcgagcccactcccgccgacggtccgtctttccctttctccgtgccggctcatcccggatttgtctgacgaccactcgcgattgcaccgcccctcagcgcccgccacgccgcaccattacgcccggagcggccggccgctcgccctccgccgcgcctgatcgacatcgaagctgttgcttcccctctcttttgctttctctatcgcattccaatcgtactcgcagcttccgacccgcccgatgtatcacccccgcacgccctccacactccttgatggagcctgtaccttcccctcaactcgtgtccctctcgtatccatcaactttgccctcgctgctcatatcgtcgccgttggtcgtcaaggggtcattgaatggcaaagcacagtcttgcagagaggcggtggcggcgtgtacagggctggcggcgggcggggcgaggactcgcgatgggacgggcgggaccgattaggaatgtagactaggtatgagaagggagggactgcggtgggtagcggagccgagtgacggcgagcaggaggagcctcggaaaggacggaacacgctcagacggcaatcagtactgcaagaagggaagattgatcgtcagccgcgatgaaggctgcaaaggggcaggcacagaagggggacgcacgcgcgagtcgacgatgctcgaccgcgatttaaggagctttgtcggcgtcgtcagcgactcgcgcgacggcttgacgaggtgcttcttgttggtcataaatctgcgatcagcgacagcagcagtcagcagcagcgagaggaagggtgtctgccgcggtcgagacggggcacgcacacgtcgcgcgggagggcaacgacaatctccttgtcggcgccgtgccggaagttgtcggcgacaaccttctgctcgtagcgccggatgctgtagtcgtcgacgcggccctgcttgacccggcggaagttccctgttggcgggggcggtcaagaagggggcgtcagagagctgtcctggcgattgagggcagacgatcaagcgaccgacaggtgatgacgaattcgccggacgaggtgacgatgctcttctcttcttcgccaaggcctgtgttgaagcgggcgggcgtaaactcgacccggccctgcatgtagctgacgtgctcgggcttgagctgcagccgccgcgggaccggcttggcctcggccgggaaggaccggtcaaagccgagtgagcccttgtagcggccctcgccgatgagcgtgtcaatcagaagcaggtacgtcttgcaggtcgcgacaagccagcggccgtcggccgagacgtcaacgccgaggatggcgtcgccgagggccggaagggccgtctggaaaggaaggagcaggccgcaggtcagtgcatgcgacgggcgcgtacgaggccagagtggcgccgcaccttggcattcttgccgatcgagtcaaagagccggatgtcgcccttgttgctcgccacggcgatgcggccgttctcggtcgtcgtcgcggcggaaaaggcgtttttgccggcgtactgcttgaattcggactcgaccatcttgttgccggcgagccgggggtcgatccggaagatgccgttgtgcgagtggccgacgagcgtctgctcccccgtcatctgggcatactttgacccgggcaggaagttgttgacggcgaccgagtcgtggaccttccactcgtcgacgaccttgcccgtctcgaggtccatccggaagagcgagctcgggtcaaactcggacttgaggatcatcgacgagtcctggttgtggagcatgaccttggtcggcttgaacgaccgcttgtcgcccggcttgcggatccccgtgatcgtcgtagcatgccggagcttggggtccgtgctgtcgccgtggcggaagacgccgatccggtcgccctggacgacaaaggaccggtcgtgcttgtagccgacggcgagcgcagagttgagctcctttgtcccggccggccgctcgacgtccgactcatcctccgagtcagtgagctccaggcctgcgaggagacggaggtgtcagcagcggattcaagattgcgagaagacacctggcgctcaccctcctcaacacctccctcgctctcctcggcctcgctgccgtcgccgttctgctccttgcgaacctcctcgcgctcgtcctcgctctcgtcagctccgtcctcctcggcgtcctccatgacggcatcctcaaaagccgagtagacgtagcgctgctcgtcggccttggccttgccccaagcaaggccgttcgtccgctcccagaggcagcggttgaaggcgtgattgaagtcaaggtagggcgccggctgggagaagcggagcgaccacgtcgtcgactgctggtcggcctcggcagggactggagcgtgcagcatgtcagccgcagttctcgcaagagcgtcagccgtttgtaatcatgacgcactgaagttccacatgaaggcgagcgcctcctgcgaccagcgcgtgttcatgtcgccctcgatcggctgagcaatgatgaactcgtccgtctcctcgagctggcacgcgaaccagtctgtcgagggtccgacggagtgggtcagcaggcggacttcgagtactgaagacggctcggtcgagcggaggggacgcacagtcaaagggccggtcattcttctcaatgacgagcacgcggaccttgccctggacgacaaagtactcggtctctgggtcaaagaggtagatttcggcctggccgccgtagatgacggggagctcctcgctgagtgcctcctcgggcgtaaatgcgtccgccggcgggatgatggccttgacctggccggcggcagaaggagcctgagcaggcgaggctgccgttgtctgcgtcggccgggcgtccttctggtggacagtcatctgggcgagctccttctcgagctcctcggccgggttgaccggcccagcggccatcgcctgctcctgcttgaccgacgctgccgccggccgggtcgtgctcgcgagcgatggtagtttcgggtacgcccggaccggctccttccacttgaggctctcgagctcctcgcgcgaggcctcgctcgacgaccggccgaacgagcgctcaaacatgcaccgccggacgacttcgtcaaacctggcgcattcggccgccgacacctgggccgggtccgtcacaaactcaaataggtcggtgtcctcgtcggccgggattggtgacggcggcgagggcccgagccggggcgacgatgatggcgacgagggtgagtggaccgaggacgacagcgtcgacgagaggtcagcccaagtgaacgagggcgcgtcgtcaaaagccgaggtccggaaggcgagcgacgggtcgatcaggaacgaccgctcgtcctcggctgaaagtaggaggagatggctgtcagctgcggttgtggccgaggggagcgctaggatgcgcggtccggagcgatgatgcgcttctgctggcaattgcgctgaacttactctcggcgtcgaggtcgagcagctcggcctcgccctcctcgtatgcgcgtgtgatgatgagctggtactggaactcgaccgtcgtgcgccggatggttgcgacggcatccttgaagctgcagcgaggcaagagagcgtcagctggccgccgggagctccgggcgtagcgccgtgcccgccgcaccagcctcgccaggagactcacatgcactcgcgcgaacccttgatcgaatcgggccggacgagaaagagggagccggccttgagctgggcgagctcggcgttctgtgggtcgcctgggatggtgcacgcgagatcaggcgagagagggaaggcggagcgaaggtcagcctcaagccggcagcaggctcgtgcgtttgtctgggcagcgcgaccgaccccagactttgccgaacactggcaagaattaggagcgcaggtcagcaagaagaggcggaattgcgagcagctcgttcacgtacggctcttgatgacgaacatggttgcagacaagggcaaggaagggagatcgtccagaggccgggggctgctgccgggcgacaaggtcagccagcgcgcgtcgccgccgccgtatacacggaggttcgtaattcggttaacgtcgaagttacggccacagcggaggctgaggcgcaggcaagctgaaccggctgggcagcccacccgcacgcaccgagctcgacacgacccagatcgacggccaaggtcgatttcaggaagcgctctgccggaaggccgctagacgacgtacactaggacgagagctgtcggctgctaggtccgtcgctcgacctctcggcggtctggcgggtcgcaagactccgccttctagaacgcgcccgagctgacccgctcgctcgcacccctcaggatatattggttgcatcgggaagcacgcgcagaatcgctctgactgctcagggatcggactctggtgcataggtcgagtcaagctcgcgggtcaagctgctcagagctcacgcagccatcttgtctccgccgccagcaggacgcacgatcggccagcctcacgacctcgcctgtctttactgtccctagacacacgagctcacggaactgttgagtccgacagcttctcagcgtgcctggcttggcgatatctgctgacgcaagattctcgccacgtaagtcttagtcggtcggtggcgacgcacacggacgacgcgcagtgggcttgaggcagcagaggagagcgagctcaaccacacccctgtgcgtgcgggcagtcacagaccactgtcatgcttggactatgttgacagcaacatgtcgcttaggtagcaggcaggccgatctccgccgccactcgatgcgctactcgagctcgggcgcccgcgtcggcttgtcgagcgtcggccgttcgcgccggcctcttgccgtcggccctttagtgccctttccacacgcccgcaggccggccagctccttcccggcaaactcgccgacgccgccgtccccgctcttgcccttcctacacgctcgccgaggcctggctagcgcgcttcgggcggcctctcagccggatcccctcgcgggcgaggcatcagcctcgtctacaaatatggtagggcgggatgagaccgtcgcacaagagagcaattcagcggacagcaggtacccgccaccctcctcggacgagatcgagacggccgaaatcgatgttagcggcggcaacagccactttccagcagtctgctcgcacgacggcctggctgtccttcggcacatcctgaacggccaaaccgcagaggctgaggctgctctgagagatgtcgtcggcgctccagttatggctgccaagcctgacgaagtccagcagttgaccgaggccgtgctcgacctcatcctctacccgtcggcaacggcggcaccatcgacgtcaaccgacgctgtcgccagcggcagcagcagccacagccgtgtcgagcaagccgaccccgaagcggcgacgcactacggctcgaccctgacgcgacgcgccatccggttcctgcacttcctccgcgtccacggccagcctcggaccgaggccatgtacggctctctcatccggcggatcctcgaccagggtcacgtcgacctcgccgcccgagtttacgtcgagctcgtcgaagagtgggcgtgggagcagaagcgatcggtcgggcgggcggccggcgtcgctcaagccggcgacccgtttgacgcgatcgaggaggagatcggctggctccgcaaggtcgagtgggtcgatccggcaaaggaggacgtctgggcgttcgaaaagtggcggcgtgggcccgaggcggccgaggaggatctgcccggccagccttacgaggaggagcgctttgcccttttccgcgagcgccggcgcaaggaggctgaggccgctgcgcttggaggttcagcccacgcccagacggcggcggaggtcgagatcgcccagcacaagcatgaccttgagcaggacgcccctttcagcggcttctttggcggccttcggtggaaccatcgagccgaggcccagcgtcggacgctctgctgggcgccctcaccctcgcgtctccgcctttacctccggcgcttcccaccttcggtctcccaagtgccgaaagctgtccgattgacgaccatcccgtttccgtcaatggcgcttctcaatccgatcctcgagcgggcggccgacaacctgacctcgctctcgccctacgggtcattcgcgaagtcggcgtcggcgctcgccatcgtcgccaacacggtccactcgcggacgctccctctctcgcacgtctcggtgctcatccggacctttgactacttgcctcagtatcctcgcgtacgcgcaccgcttccgagcccggacccggtcgacgacacgacggcctacacgcacgtacagagcgcgctcgcctccctcgtctacggtcttccgccgggaagtatgaccgagaacgtcgagcgcttcggcctcaactcgatctctgagggctcggccaattcgctcctgtcgtacacgctcacgacgctcaactcgccgacaaagggcgagaaagtgctctcgtacatgcgctgccagggctacctcaactcgcccgcctcgagccggacgaccggccagatcctcatcaaggccggcctgacgaccaaggtttggcgctatttcgtcgacggcttccagatggccgtcggcgagatggccggcgcctttgtccgcctcctccacgagcgcccggcaactcctgaggcactctcccggacgcggggcagccagtggcagttgccgacgaggttgtcgcagacacatcacttgagggtcacactggaactgtcagagcacccgctgccgccgcccgccccatctccgtcggatcggaacgggcccgtcctcgaaaccgaagcagtcgaggggaacatcccgtcaagcgtcccggttcgcgaggtcacgtcaaagacggcggcacctttgcagccggtctccttgcccacccgcggcgcttctacgaatgacggacgtcatacgtcgaccaaagaagggcgcccatccaacgacgagatcgactcgttcccctacccgacggaggaggagctcgggcccaacttcgagacgctcttccagtcgttcctccagagctcgagcgcccatgactcgtcggcgacggcaacggcgctgctcgactatgcggccgccgctggtcggtacgacctcgttctccagatgtacaactacctcctcggcagacacgtccgaccggtccctatgacggccgcgctctacggatcgctcatcctgatcctcgtcaaacgacggtacgaacggacggccgagcaagtcttctgcctcgcccgtaaggagctgatggcgcagggcctcgatctcgaggtcgacgtctacgtcgccatgcttgcccagtatgcccaaatccggaggcgcaccgtcggccgctaccttcccgacggcaccttctacaagaaccctcgctccggacacgtctacccgggtgagcccgagccagccgagcgtgcgctccgcggcggctggggactctaccgtggcatggtctggggccagtgggagcactgggctcccgtgcaggatcgcattctttacaacgacagcccctttcctcgccggaagtggttcatccagggcccgcagctcccttcgacggttatagtctccgccgatccaactggcgagcccgaatttcgaccgtcgccctcggccaatctgtcggagctcttcaacgcggccatcgcgctcatgcgcgtgcaggaaggcatggccgagcttcctcggcacgtcctacgctcgaaggacctccttcgagccatgattgcgacggtcaagaagaaggcgctcaacgcccggcgcgccgacgctcccgagctggccggagccgacttttacctgtcgctcgtcgcgctcgacatccgtcgggccggcttctctgtccccctcggcgtcgagctcctgctcgccaagtacccgcagtaccacgagcgtatccagcaggtccagccgatccggccgctgtctacactgcgcgaggccgaggccgacctcggcttcgcctactcggtcgatccgttcaatctccctgtcgacgttcgagccaccaggcgttgtcgaccggagccgactttctcctttgacggcgccgagatggaccggctcggctcagccgcattgtacccggccggctcgttcgaaggctgcgacatctcgccctcggactggccgctgctcgtctgggccgcgctcgagggccgcgtcgagactgacttcaacctcccaccgggcctctgggatgccgcgctcgagcttaaggacaacttcgcaatctcgaaggacggtcagtacctgctgctcgtcggccgcctcggcgacccggtgccgttcgtcccgtctcggaaccgcgacgaattcatcgcgctcaacacgccgcccgaattggccggtcgcccgctcgacctccgggaccgccggctgttccgcgccctcggtcgagcgggctggtggccgggcatcgagcgcgatattcgtgaccacccgagagcactctggcgcgagagacgagccgacccagattaccaggcaggacttgccagacgtatcgacgatgtcgtccggtcgggcgcgcgtcgtgaggagccggccgcctgcgagcagaaaggcgacgagaacgacccggacgatgagcacaggtttggccttggccagccatcaaccgaggctggactccctcgcccgccctgggctgccggactcggcgtgtctctgcgacccctcgcagcgccgccgactgggacagcctctgccctccctcgaccgcccaagttggcggctccgccactgccgcgctagacatgcaaggccatctgcatttatcacacgatctttcgcctgctttgtctccccgacttgaaagtgctcggccgggtgaagcaattgacgtacgcatcggacgaagcctgtgttcggccaagcgagcgcctctgccgccgcctgtgagagacgatccacccaacctcgacaccctatcgcccagtcgtctcgccaatgtcgttcgcgccacaccttttccgttcgcccgtccggtcattgctcagctcggccgctgccagcagcaggagcagttgggcctttgcctcggccgtcgccgggtcaagcaggacgccggccgtctttcaccagcagcgctgggcgtcgagctcgccgccgccgccgggtccgccatcatccagcgccccgacgcccgcagcgccctcgcaagctagcctagatgcagagcaagctgcaaagaacgcagcgctctcgtacgcgccccgtccgacaggcaagaagggcaccgaggagtttgtcggggtgcgtccctccaagctggccaagctcccggctgcgggtgcgagctcgatcaggtcgtgctgacgcacgctgctggcccctctccaggtcttcaattacaaggccgcaggcatctttgtcgtgacaggcgtcgcgctcttctggtactttgccaacgagaaggagcggattctcgagctgaagcgtgcgtcgtctcgagtcagcaagtgctgcagccgcgatcgctcggtcagcacgggctctagatgctgaccgctaccctcgccatgcttccgatcttccaggccagcagcacgccaaggccgtcaagacgggcaagccgctgatcggtggtccgttcaagctgctcgaccaggacggcaaggagtttaccgaggccaacctgctcggccagtggagcctgctctactttggctttaccaactgccctgacatctgtcctgaggagctcgacaagatgtcggacgtcgtcgacgtgctcgacaagaaatacggcccggtcgcccggcccatctttgtctcgtgcgacccggcccgggattcggtcgctgccgtcaagaaatacgtcgccggttcgtcgccccttgacgcccggtgccgcctgcgggcatcgctttgagcgccggctgatctagcgctcctcttggtccagacttccacccgcgaacgattggcctgacaggctcatgggacgccgtcaaggcgacatgcaaggcctaccgcgtctacttctcgacgccgccgacagcctcggcaaacgacgactacctggtcgaccactcgtgcgtccagctgactactgagcggtccttcaatgtggctgacggatctccttcacagcatctacttctacctgctcgacccggacggcgcgttcgtcgacgcctttggcaaagaccactcagccgagaacgtcgtcgagaagttcgaggaggcgcttctcgagtggaaggaccaccagaaaatcgccgccaagctggcgcggtcgacgtagccgtgccgttcgctcggaatcacgatgcacaacacccctcctcccttgcttgcgtcaggccatcgatggagaggggcgcatgcgcagcatgggcaagacggaagggctggagcaagaggacgtaaggtcgttaggtgatggaagagagggcgtgagctggagggcgctgaggacggctgatcgggagatagagcgaaggagtgtgatgggcggtcgccgagaggatggcggccgaaaaccgaaagaagagagtcggggccactaggtgggcgaggggagggagagacggctcaaagcacgtcgatggagagggctggagggcggggcggaaaacgcagagaggtcagcaatggactctcgacacgcgcgacaagccgatcgacgcacaggaacggcgtttgcggagaacgcgcttgccgctgtcgagccggacgccgccagtgctcgcgctttcgacagccgccttgaccttaccagttttgctgccggctgtcgtgctcgccccggcgaacagccgcttgacgcccgaccgtatcggcaggcccgaaagcgtcggcaggcgtgagcttggcgagccagccgttcggagcgcgcccgtcttcggcgtcggagaagcgagcccggttgggcggagaccaatctcgaagccgagcgtcttgctcatgccgacacgcgactcggtctgcggaccgaccttgcgggtcgagaccggcaccgccgacgatgtattgccggccttggccaggcgagtcggccggagtccgcccgtgaccgggtggttaacagcagtcgacgtagactcggcgccaaaggaggtgccagagcccttcttggcagggctggagagcggcaccggctgggcagcgctccggtactgcggcgccggtgcaagcggcgcgggtgccggggccggctgagcggggggaaggagcatcgtctcgacctcgatgcgctcggtctgagccgatttgcggaacttatttctgcgagccggcagacggccgagcgggtcctcgtcgaggtccgacgatgagtcctcctcctcaagtgcctctgccgtccgcttggccagtggcgtctgcaagtagcgagaagtcggtcagcttgacaggacgagggagcgccgtagacgagtctgtgacgaaccttgcgcggctggaggcagggcgtcatgccgtcggcagcggttgccgtccgagcaggtgtgacgcttggcatcgcgacccgccgagcaggcgtcgagagcggttccatgtcgacgtcggtcgcatcgctccggaattcagtcggtggcgtcctcggccgggcgttgatggtgagccggacggcgcgtgcggcagccgacttgcgctccgtctcaagcgaagccttgaactgggcgatcgcctcgtccgctgcggcccacttgacccactcgaggtgattatggtggatgtactgctgctgcgggccgacgaccatgccgggctacacgacgacaaggcaatgtcagctgatggtctgagaagaagggcgacgcgaatgtagcgacggacacggcagatgcgcatgaagccgatgacctcgcctgcggtgaacccatacttgtagacgaggtgggcggcaatcaagcagcccgtccggccgaggccggctttgcagtggatcgcaatgacgccctcgtcgtcgataatgcgatcggcgtcgcggagaaattcgcggaccatctcgggcggcggctatagcggtcgcagggtgggtaagttccggtcagcgcagggcggagggaacgcatacgacgggacaaacgtttgtgccgtcctcgaagaacatgtccttgaactcgatcccgcggcgctcaaagtcgcgccggtcgtagagcgggttgttgagccggacaacgagccggacgcgattctcctcaaagtagcggaggacgttggcgtagccgcgcgagcgcttgcggctcatcgtctcgcgctcgtacgcggcgagctggcccgtgttgagcgcgcggacgtaggcgttgtcggtcggcgaggcaaaggcgatgaagtcctttgacacccaattgaagtcgccattctggacctgctcgtagtagcagtattcttccgggttgaaggccgagaggtcgatcaggccgagctcgagcgccttggagataccgtacaagcagtcctgagagaagcagagaaacatcagcttcgggttgacatgaccagctcgcgaggcgctgccgcacctggatcgagaggccgtagtcggtctcgcaccggccggcgtcgcggaacggcatgaactccatctcggcgatcggctggaaggcctcccatggcttcttgcggccgcagatgagctgcggttcggaaggccgacagacgtcagcaaggcacggctgcgcagattgagcaggagcgacgcacagcgtagagcgcgacgagcagcgctgcgttggccttgcgccgcggatctgttgatgtgtagagcacaaagttgacgcgctcctgattcttgtcctgagagacaggggaagaccgaacggttcagtggtctacagcgggcgagatcaccagcaggcggacggacctcaagcttcgtgtgcatgcctgagtcggcgacaaggaggacgagtcagcacagatacaagcacagcgtcgatacgagcgcgacatacggatgcaaaagtcgtagactttcgaaaggttgagcctgtgcgagcagagaagggcggacgaggtcagccggccaactcatgtcgcgcgcgcgcagcagacgggctcgcgcggcgccgagcaggaagcgacagaaaggacggacgggccgaagtcgtgcgcgaacgagaggtacgtcaactcatcgtcgatgcaccaccagctccattcctgggaggcgagagcagtggcggcagcgaccctgcttgcagccgtccgtggcttgggcccgcctcctccgacggcagcactgctcgagcctatggtggccacggcggccacggccgcctccccctcctcggggtcggtcgcgagctcgagctcgacgtccgacccagacgactcggacgaggcggacgatggcggtggcgaggacgtctggccgccgttgacgacgcctgctcgccgagaggaaggcgcccggcgcggggcgttgaggaagtgatgtgacggcaggggcagcgggagggcggcgaaccagacactagaggcagaccggcacaaaggagcgcacagagagacgaaggaaaggtgacggcgtcagctgcatgccttgcctcggtttttgagagggcgcagaggagactgtcgggtctggcatgaccggcacgagggccgaccctgccggaattgagctgagcgagctaggagcgccgtgcaagagtagagagaggacacgcaccggtccgtgaacgcgatcatgtgcttgctgtagagctcatcggcccgcgggctcttggtgctcgacgacgaggacgccatggcaggacggaggcggcgggaggcaccggcggcggtgttggatgaaggggggggggcgagcgaggcggacgcagaccggcaggtcgcagtggcggcggcgacagcagagaccaacgacggggtcgacgtccagctgttggtattgagactgctagttgtcgctaggctcggtcgagaaggtctttcgggtcgagggacgtggtcagaggagaccgactactcgagccgctcgatcgctcagcttggacatgctggcccccgcggaggccgccgaacgcaggcgcagtttcgccctgtcgaggtcagtcgcgtaaatgaggtcggccagcgcagccccgacgactacgccttgctcgagccgccttgcatcgcctttgtctgctgcacgatctttgttgacgagtgaaagcagtctaaggtcgggcgcctgtcctcgagtgccgagcggctacagacaacgtttactcgctcaccagcgtgcctcttctcccgactctcgctgacgacgatcgaagtctgctcggaaaggtaacggcccggtctgcctgagctcattacggcgatgagccgaaggcggagtacagccagagccattctatcacacggtggcagcacgcaggtctacaacctcattgacgcccgtccgttcgttctacacgcgccagggcgcaaggtcctcctcggtcgcagccggcagcgtcttgacaactctcgccgggttcccgaccgcgaccgaccgcggggggacgtcgcgcgtgacgaccgagccggcgccgatcgtcgagccatcgccgatggtgacgccggggaggatgagggcgccgcctccgatccagcagtcggcgccgatggtgatagccttggcggcctccttgcctacagtgaagtaagcgggcaggatgagcgagcaagggttagcttgtcgtcgggctgagaagagggagcgagagggccgcacccttggtgccgttgcgcgcctcaggcagcagcgggtggactggcgtgaagatttggacggaagggccgagcatcgtccggtcgccaagcgtaatactgcaggtcgagacgagagcgagtcagcctcatgcgacgctgctgggagagggcggcttaggctgagggacgtacggcgcgacgtcgaggaacttgcagccgtagccgatgacgacgtcgtcaccgacgatcacattgaagcctgccaatcagcgagtgggaaggtcgtgtcagcgactttgaccttgagggaggaagcgtgctgccgtcggcgatcacgcaccgtactcgcaaaagagctgcgggagaaggtgcacctggttcgttggccgagctgcaagaagcgaagtgcgcttggttgacctgcatgcgtaagagagaagcacctgaacagagcaacgcactgcagtggaagtagtcgtgaatgagctcttgctgccgcttcgggtccgactcggcctggagtgcggccagcttggccaggctcgcttgggcaacgcgctggatgtaagggtcgctgtaagtgtacggccggcctgacgaagaggtagagcaggcgagtcaggacttgtcggaacagcttcaacaaggcgggaggtcaggcagataggcgaggtttggagggagggctgcgctgcgcgcatcagccgagcccacgccgccaagaccgacaggccgggccacgctcagctcgattcagcccttagcctcccctcgcgcccgggcgccagctcaggacgtaccggcaatcatgccctcgaagccagaggggtcctctccggcgagcggtgcgggcggcgtcgtcatggcggcgttgacgggctgagatggaggtcggtcggagggaaagcggcggaggggctgaggcgagcggaggtcgcaaggagggcgacgctgatggattgtgagcaaaggcgagatgggtgttagtaaagaatatgtctggccctccttgaacagtccctcttttgagcggccagacacgatgctggttaacagtcacgaaggcccgcgaccggagcggtagccgcgacagccgcgaccttcccggagcccctcgacgtacgccggccgacgttcatccggccgaccgacctgctgctcacaagctagcttgccagttgacccgctcacctcatctccctggcaaaaacggtgggtcttccgtcatccgctctgccacctgtcgccccttgaccgatcttgcgacagctcgctgacgcctccgggctcgacggccttgtcgggccgacctcctgtaccactcgcagccagcccgacatcgccagcgctcgccgcaacttcaccatccggttttgcttgcccatatctcgcctgatccaacgttccgaccatggctaaggctagcacggacaaaggcaagggcaaagccatccagatgcccggtgccgtccgcagtcggcgaggctgtcttgtctgccgcaggcgtgcgtcctctacctcctcacctcagccttgcattgcctatgggagcaagtcgatctgagaactcgtcgacctccgttggcaggccacaagaaatgtgacgagcagatcgaggtacggtcgtcgtgcccgagcaagctccttccgcggccgctgctgatcaactctagtcgccccgctacaggacgggagctgcgagcgctgccgagtcgctgggcttgagtgcctgctgccaccggctgagagtcgcacgcgatactctgggccttcctacaatccgggcaagcggcagatccgggcggcgtctcctgctgcccacggcgggctgtttggcactacgcccgaggcgcgctcgaaccacggcgccaggcactcgtccgagagtcccctcgccggcccttcaacctacgccgatgtaccagccagagcgctcaatctggaacctctgggcttggtcggcacgatcgacgaaacgctcggcttcctgcctctccttgcctcgtcgtcctcgacactcacaccggcgccgaccgaatcctctgcgcttgccctcttcggtacccacctgccggatatcccggcggcatccacctgggacccgttctccgactgctttgtgtcatctccatcgacggcagacacccagcagccgccctcaccagacgcctttctccgctcctggccaggcaacggaggtggcatgtctgcctcggcaaccgactttctacgctcgattcagccctggaccgacgccgccttcggccacctaccgccattgcatttcaacgccgcgagcactcgtctggcgatgaatgctctcacgcataagtatatctcacctgatacacccttgacgcaggacatctgtacgtcatggctcgcctcgacaagccagccacaaatcgctcacgtccttcgctttgccccgtttccttgcagacaagttgattcacagtgagcctctattgcgactcgaattgcttgctgaagctctctgacgaccttctgacgtcgctgcaatcagacacctggttcatcatgccacagcagccgacttactacgacgcaatgtcggcccggtcgggcacgtccaagctcgcgcgcgatcttgtcgtcaaagcctttgaagcgctagtgccctcagagtcggacgaggcgcaggagggcctgcaagaatcgacctacctctacgagcaggccgttcagcggctcgtctcgtgcgccgacatgcgcttggacgaccggatgcacatcatctctgacttgcgtaagtctctcattccactttgcataagtggtgggctgatcacccgccaccgacttctttgtagaactcttcagctttgcagcgtccggagcaaagcaagcgtacgaggccgtcgacctggccgacgactttttccgggcgttaggcagcgaagagcaggtctcggcgttcctgcagaagacgctggtcgacccaaagcaggaggcagccctcaagctcttcattggcatggacctctgccgagcgatctgtcggccccgctccaggccttttctgcctctgtgcgtcggcgcttgtcgccccaaagccttctacgcacaagtccactaacaagggtcggcgacttcaggctcaagctctacgcgactgcggccgagaacgaggcggcccacatggtcctcttccccttcgagctttctgtcgtcctgtcccacatttgccatctgcagggtgcgactctcaccccggccgaggtccaggccgagacggccgcaatggagcccgacatcatgctcgtcaatgaggaacgggcctctcgaccctgggtcgtgcgcatctggaagcttgctgtccgagcgcttctttaccagcgcatacgccgagtcgggccgctccacccggtcctccagtcgattgcggccgacctccggcgcgagttcgaccgctataagcccggcgagtcggccgtcgagaaggcgctcagcctcccgctcttcatcgccggcacgctcgccctcgcctggtccgatcgtgatatcatccaagcccactggacgacgctgaagccagaacgcggctggcaggagccgatcgcgcttcttcaacgcatctggaccgagatggaccagacgggcgacaccgtccgctgggttagtcccgctatcggagtcttccctcttgagagcaggtgctgacaagcagacgagggcgcccaggaggaggtcgtgctcaaggagaactggtcgattgccttcttctgatgcttttggtctgctcgcggaaggcggtcttgacccgagtgctcaccaagaacaactggccatcatcctgctggatcacacgccgccgctgccgatcgtactctaccgaccgagggcctcgcgcacagcctgctcatcggcgtggtcgacgtcaccatctgcgccatcatgctccgggatgacctcgtactcgtcgggcccgcccgagccgacgtccaactgcggctgctcgtcggggggaactgggaagaaggcggcattaaggtcagccgatgcgctaaccttggtcggccggagggaggaaggggtctcaactcggctcgtacatgtcctcgccctgagcgcattctgcatgcgttgccgcgccgagctgctgcaggaaggcgagcgagacatcgtcgtcgggaatcggcctcccggacggtccccggtcgctgtggcgggcgtgatcgctggggggtggtagcggcgagacgtgggaggtcgacggcgaagcctgagggtcaggaaagtggtccgatggcaggcggagcgacatcaggtgcgctgtgggaaaggcattaggacagtgaagtcagcgagacgccaccgacgacgcggcccgcgctggcactgacgatcgacctcctgctccggcccaggcccagtttgtcgcgagcctccgccgccaccaatgtacgggtttgggccgtgaccagccctcgagtgctgagcacgcgcctcggcctgcgcctgctcgacgacggccgccagcgtgctctcgtcaatcgtgtactcgtcgtctgggttgcccgactcggcgtcggcggtgtggtggtggtggtggtgatgctcgctcgatccagccgggtcgtcgagcgaggggtcgatcgtcgagtgcgtgtagagcgtgtaggcgtcctcgtgctggtcaaggtgctgctgaccgctctcgctctggtggaggttgtcggacacgctgccgtgcgcgtgcaggccaaggtgagatggcccggcgacggcgttcccatccatcgcctgaccgtcggccgactcgtcgtctgccttgcggtctgaagcgcagcgaccaggtcagtctcacaaacgccattgccagacaagcgcatggtcaaacgcactctttgtcttgtacttgccgcgcttgatcccgacagggcgcttcttgcgagacgagtcgacgcagggattaccgcttgggttccgcaagcacgatgcgcatggccggtcacccgagcacttcttgcgcgtctttggtcgcgggcgagagggcgagggtcagcccacagttcagggtaaagcagcggaagacgggggcaccttctgacaatttgtgcaggcattcttggtggccaaggagcagcaacagaggtgggtcaaatgagtcttgctagtccggcagaaaagcagcacgcacccgaacctgctccctcgtccgcttctggccgttctgggagccctcgccgcccgagttaccagcgttggccgcgtcgaccttgggcgcggccggtgcctttttgcgcttccggctcggcgccggcggcggaggcagtggtgctgggactgacagcggctggccatgaccgtgagcgagaccgatcaggccgttgacgacctggtcgtgatcctggtcgtcgacgccgaaggacgggaggccgaggccgccctggtcgtcgtcgacgtaaggtcccgacgagtcgatgccgacggcgccgccgcccgtgcttgagagggcatgaccgccgcccgagccatcatcctcgccgacgccgcccgggccagacgagccgggaccctcgagctcaaaggtgcctggcgcaccgtggttgtgctggccgaggagctcggcaaactcggcggcgtgctgctgctcgatcgactgaaagtggtgcgcgtcgtggtgggcgaatggctgatagtcggccggtggatgcgggtagggcaggccgacgtcgtcgccgttgttaccgctgccgtcaccggctatggccgagctgccgagcgagtggtcgcctgggtcgaacgggaggtgggagaggtcgagctcgtcgtcgtgcggctgagacgactgctgctgctgctgctgccgatcgccatcgtgaactgacggctgaagatttgggtggatggcgctggcggtggcttccatcttgggaccccgacccgttgagattagatgcgggcctataggagtttgaaagtcgagtcgagtaggagtttgaaaggtggcggccagctgggaggggggagctggcgtcggagggagcgcgcgcgcgggagagcgaggccggcgcgagcaggctgacagggcggaacaagtgcctccattccgacgtggattctgattacgcaagcaagctcaatgaaggagactggcgactcaagtcgggtgtaaggaggtcatgtacatccgccaacgttgcgcgaccccgtgggcgcagcagtcgatgggaaggaatagaggtcgtgaagaaggagtttacaacgcgggtagtgaagcgagcgatacagggacgagtgaaaatgaacccgccagctaccactctttgtcctcggcggctagcgcctcacgacgcgacaccgaggccgggtcaaagtacggccgctcgccgaggacgcagacgcgctcgcccgcccgcttggccgagccatagtcgtacgtggccgagtctggtttgaggggaaggatccaggtcagaacgaggacgtgcaaaaagggcgcaatgatcgaagacgcacggtgggtcgaggcgttgtgccagagcgcgacgtcgcccttctgccacttgaagcggacctggaggtcgtggttctgggtgacgaggtcggtgcagtacttgagcaggaaatcgctctcgtccttggtgacgccgttgatgcgcttcgtaaaggccttgttgacaaacagactcttccaaccggtgatcggattcgtccggatgacggggtgctcggccgagaggtcaggcccggcgttctctgggtggccccgggccgtctcgcgcacgctgatgccgagccggcctgcctcgccgtggaagaggttgccgtcgtgcgtcgccgtcaggccctcgagcatggccgcgatcgtcggcgagagcttctcgtaagccgcggccgcgctcgcccagagtgtgtcgccacccgtcttcggaagagtgttgatcttgagcatggcctgaaaatcaacgaaagacgggtcagtctcgagcgagtgccgattgagacgagaagagaggcgacgcacaaacgacgacggcaccttctcgaacgtgatgtcgctatgccaggcctcgctcgcgtactgactccggtcgtcgtagacgccgcggagtcctccgcccttggcctgcttggtcgagctgatctcggcaacctgcggcagctcgggcgagtcgtccgtcaacgggtggacatgcaggcccgaggcggccggcccgccggagagacggccgagcgcaagcccgagctcggtcatctcgacggcggtcaacgactgggcgcggaaaaagacgacgccgcggcgggcgacttaattgcaagaaagagaaataatgtcagcaaaggtggttcggactgtgctggcgacagacgctgactcaccaagaacggccagatccttgatcagcttgtccgagtcggccgccttcagcaggtcggctagctgtagatctgatgcgtactcgcggccaatgacgggcgtcgactcttcgtactgcaggaatggcggtgaagttgtcagcctcggcgcaggagtcgagacacagcaaaggtggacggacagaatactgttcgaacgagccctcgtattcaagcggcttgtcgttcatcggccttgacgaggacgcctcgtcgaacgaggcaaaggcggccggctgctgcggggccgtcgacgggaccgttgctgttgacgaagaggaggttgaaggcccgccggccgttggcgaggcgaggggcgaggcgagccggagcgtgccccatgtcgccggcgtcttcttcgggccggagggcttgagggtaagggtcgacgaagacttcatcgttggcggagggacagagagagaggagggtgctgctgcggcagagggttgttgctgggttgcaagaaggattcggagtggcaaacgggagatacagtagagtattcggaaaggatgatgggtgtcgagtggaagcttgtcgtcaagcccttccttcttgctgcccgtctcggcgtgagctcgtcagcaggcccgatggtgggtcgaaggcgtgcgaggaggtggaggccgatgctgcttgttcggacagccccgagcccggcttcttggatcgaacatagcccggaagctacgagaggctgcgagcaggacttgaggccgttgaggacacgacgagctatgagctcggtcagcgactctggccgacaggtgagaccgaccctgccgaccctcttgtcgaggtggcgagcgacgtcccgttcctcccacgggcacgtcggcaggactggcctgcctctcttcgctcatgtggttggtcagcagccggggagagtccagggcagggtcggaggccggggcgtgacgtcggagctcgggtgagtgaggcgagcacctcatcggcggcgcaaagacgcgagagcacgcggtcgcttctcgccgcccgcggccagagtcgcccaattttcaggacgaccggccgtcgtcgtccgttggtgctgccagtggcagtggcggtgagtagggcagctgttgagcaaaggttgctgtcgtctcgtcgttggaatcaagagtggataagggtgagctgaagagccttcctccctcgacggcttccagtcggaccgggtcaagccggctcagtttagctcaattcagctcaattcatgaattgatcatgatgacggcagccgaattcagctctctactcttatcgaccccgcccggcgcgtggtttgaaccgccaagagtaggctcgctctctccgcaagacgccttcgagcggccgcctgaccccatcgctgcctcgtgctgttcttccaaccgaaactgcatgcccttctcgctcgctagcctctaccgccgactttccctcgccatcgcccgcgccaacgtctcatctgccgccgccgactaccgaccgacgagctacatgcctcttcgcacccgccctgcagccgcaggcgacccaccggcgctcgccgctgacggccggtcgacgaccgacgatgggtcgagcaccgaaggcgtctcgccgagacacgcctacaccgaccgcgacgacgatctcaagaaggatgcgctcggcgtccggaccgaggaggtcgagccgctcgtcggacgcgagaacctctgtgcgtctcgtcgccggtcgccgccgtcgtttccagcctaagggacgagctcgccgcgatgagaaggcagtcgctgatggactcttgcttcttgttgttttcagcgagtgccctacccccacacaccgacttctggggctacgaccaggtgcgtcgaccgcttcggctggttgattgtgctgcttgggagatggctctgcatgccaagcgagccaggccgggacgcgccttccgtcggcgctccgccctgttgacccggcgctgaccacccttctctcggccttttgcagtgggacccagcctttacctggacgccgcaggaggagcgcaaggtcgtccagattgccgacctgaagctcatggtgcgtgagctgcgagctactgggcgtcgtgcgcgaaggcggggtcgacgctgacgcccttctctcgtcttcacgtgcgcgcgcgtgtcatcttcgctgcccctccttcgacctcgaccttgcaatcttgccgtcctcgcgaactgttatgccctcgtcgccagacctgcgtgtgcatgatggtcagtccacgagagctctcgagcctgacttgagggtcctggtgggcaaagactgacgcagacggttctgcccgcccgccgtctctcaacagttcctggtgagtctggaagagactcgtttggctttcaagctcacgcctcgaaagtacgctgcgctgacgctttgatccgattggttttgccctcagttcctacaactcgaccgcggcaacctcgccaacgcgctcaccgacaacatcctcgccgacctcggcatcaacaccaatgcctacaacaacggcacgacaattcagctcatctgctttctcgcgtgcgagtttccgtcgcagatcattctcgctcgggtcggcttcaaccgctggctgccgttcctcatgtgcgccctttgcccctttttgtcctcagacctgcaagggctgacaattgttcgctcacttgctgctcgcccgctcgccaggatgtgctggggctccgtctcgtgctggcaggccttcatgaccaacgaggccggcttctacgtcacccgcgcgctgattggcgccttcgagtcgggcttcatccccggagccgtcctctacacgtcgtgcgtcgcctgctcaagctgtctaccatcccccttaccagaggttgatcagtcaattgtgacaatcgtagctactggtacaagtcgggcgaaatgtccatccggctcagcttcttctggtcgaccctcaacatcgcccgcgtcctctcggccctgctcgccgccggcatcctcaagatgcgcaacgccgccggtcggcctggttggttctggctcttcatcagtgattttggttcctattcctcaaccattgacagacggatcgctgacggctgcaatctctcctcagtcgaaggcggtttgaccatggtcatggccgtggttgcctggttctggcttccttggtcgcccgttcagaccaagggtggcttctggcgcaagccgtggctgactgaccgccagcagaagattatggtcaaccggtacgtcgcctcgtggtcgtcgttgagagtctcagcctcgaaggggtcttccccgctgacatctgcgactccttggactgagcagcatcctccgcgacgacccggctaagggactcagccggcttcagaacaagatcacgttcaaggactgcgtcgagacgtggaaggaccctcatctgtggtgcctcgtcttcatcggcctcatcgcctacatcccggcctcgcccgtccagggctgtacgtcctacctctctctcatcttgctgcacacctagcctttctttcgctgacctgcaaccgctcgctggctggcagacatgaccctgacgatcaagcgcatcggtttctcgaccttcgacaccaacatgctcacgatcccgagcgcgatcctccagatcatcaccatgctcgccctctcgtattcgtctgactacttcaaagagcgcaccttgtacgtcggccccttttctgaagcccaccagagcgaggctgaccgccttttgaccctctgtcagccactgcatgtttggcgagctctggatcttgccctgcctcatcgccctcacgacgatgcccgccggcggcaagggctgggagcgctacgcccttacaactcttatctcaggctgtgagcagcttagctgccctacctctttctaaagatcatttgctgacaaggctttgctttgcgatcagacccatacttccacccgatcgtctcgtcgtgggttagtgagaactcgttctcagtcaagaagcgctcaggttcgtctctcccgtgcctgttccttcttctcgtgccttggctgacctgaacctgctcccatcctacagtttctctcgtcacctacaacgtcgttgtccagatgggctccgtcatcagttcgcagctcttccgcgccgacgacgctccttggtgcgcatgcgacctgcttccccttactgtcgagctgctggcctctgactgtttgcgctgtctcccatcgcaggtatttccgcggcaccaaggtcctcaccgccatctgcgccttgtcgatcgtcacctttgcccttacctggctctactttggccaccaggtgcgccgcgacgcttttcctcggctccttgcgcctccactgaccccctcgcaatcgcccgctccaactcgcagaacgcggagaaggagaagatctggcagaggatgacgcacgaggagcgcgtcgcttaccaggaggacgtcgccgcgcgcgagattgacggcctcaagcggctcgacttccggcttacgcgctgagcgtgcaccctcgtgcgactctagcacctgccccttcacctgcgtctttcccgaacgacgtgtatcataaatcaccagacgatcttgccgtccaccctagtctgcctgtctctccttctcctctcggtctctatcagacgtcgtcctgcacttcaatcttcgcttcctcggccatacatgcttctttcctagacctctctttgtccacctcaactacagtcgcagcttgcttgcttcgtcgcttcaagcggaacaggtgcaaggcccaatgattagaggcgatgcctacgtcttcgacagagctgatgcatgagcaatagatgggccggcgggggagctggcaggagaggcgaggtcagaggtggccgtcagagggagaagacgcaagcctggacgatgcgacccctttctctgctcgcctcaacgctcaaccgctgagagcagccaacagctttccaagcgtcgacaggagtcgtagaagatgattaaatagggtgcgagaagctacagtgggttgcgaagtgcgaggacagtgtgaagcagatctaggtcgaggcgtgcggggagacgacgcgaggaagagcgtgacagcaatcagaaatggcaggacgggagacctcaaagcatgaggccaaagacggcagtgaaaaggagcgagatgctggcgctgatgatcgactgccgtgtgacgggcgtcgcagccgacgtctcattcttggcgtcgggcgaggtggaagagggcgagccagagttggcgtcgtcgatcttggcggccgacgagactgcggcggcggccgacgacttggtgaccgaggcgatggcctcagaggagctgctcgacgagactgccacgaatgtgctcgacgaagccgtggccgatgatgcgctcgacgaagcagcagcggacgaaggggccggtagagcagcacttgagaggtcgacacgcttcgtgttggtgatctcaatcgacccgacaacgtccgacgagccggttagagcgttcttgtactgcggcaggccgaacgcgcccgggatatcggtcaacgtccagccctgagcgatcatgctcggatacatgttgatgaagacgtcgacgcagccgtcggtgagctcatgctggagcatgaggaggccgggcgtctgaggtccgtcgacgaagccctggacgttgtctgcgagtgggagggaaggtgggccgaaagtcgatgatcagccgaaagaactacaacttggcaggggcgaacctcttcgacgtactttggatctcaccgatgtctgcgccgacaccgagcgtccagtcctcgctgtcctggttccagatgacggtgtgcaggccaaagacctcgcgggcgatggcgcggacgcggttgtcgacgtcgccgtaaggagggcgctattgggaggctcgatggtcagcgagcgaacaggcgcgaagcgtgtcggcggctcctcaacgtacccagaaggacgggatgcggccgccattcatgtcagccagaactgcattgagaagggacattgcgttcggagagtcagcgatggcaggtaagattgagcgctccgagcaaagaatttgcgcaccctgcatcgtccagccgagttcgccgagcagctcttcattcgtctggctactcgagtagccgtgggtccaagagtgaacgccaaacgtctggttaggaatatcacgagcctgaaccgcaatgtcctaaggaggagggagcggtgagatgtcagcgagagcacgcaagtcgtcaaagagtatctggaacgcactgtgttggcgacgacgttggcacctgattggaagggccggcgaggagcttgtgcatcagcaacggcgactttcaggacagagacagtaggaagagagaaagtagaggacggaccgatgtagaagtgggtcgctgcgatcgagttgtcgcggaagaactcgttgagcgccctgccgggagggagcggcccgtcgtcttgcgaaatctacagggcagcagattttgagaagcgtcagccggaaggaaggggctgttagcaaggttatgcgcgcgcaagactcacgccgagcacgccgttcggggcggagctgtagtcggtcgagacggtgcagccgaccgcttggtggcaataccgagagtcggtcggggcggtgccgtcggggtagctaggcctgaaagtttatgcgcgtgcagaggagaccgtcagcgtgaaggtccagctccctgcgcaagcggtcgtctagctgcggtggcgagcagaagtgtacagtgaggacgaaccagccgtcggtgatcgtcgcaggaggcatgtcgggaatcttgccttgccgaacaacctcggccagcgcgtcaagccattcctgcttgggagtggggatcgagccagccgacgggtaatggcttttccattctgcgacaaaagaacggagaatggcgggtcagttgcgtggcttcggtcagaaggacgatttggccagagcgcagggcagaccttcgcttccgacctcggcatttgggccgcgcgcaaagagctcgaccggcctggccgagacgaaggaggagagggcgaccgagccgacagcgatcgccgacagcgcgaggggagggagggcgaccatctgagtgaagcggaggagagcggaaaacgagggatgagaggaagagatgtggtcaggggatgagattgacctggtgagccctgctgctctttgaagaagagttgactgacgggcgtcgagtcggtctgtcgccctcttggctgctgcgcggctcggctcccgcatgcggtaaatcgccgcgtgcggccggttccagcggagccaatcctgcggggatgctcggtcgcgtcgtcaccgaacagtaggagctccgccgacccgcgcaggacggtccgatgagtggcagaagtgtccgagacgctgctccgagcggtaaccgcctgcacgacggacgcggcacctgggcctggggtgcgcgaggacaaaagacagggtgacagtcgctgctgctccagtcttgaggacccttggacggcgcggcggcgagctttgctcgctcttgacgggaccaagagtgacccgttagcgggggccggaagcgcatcgtccttcgccgaggaggccgtcgacgccgagaactcagacgaccggcgacatgcctgtcactggctcgtcttgttgacgacctgtcggcgtgcgtttggctttgaacgatagagtcggatccttggtcagcagcttgctgaagaggcgcaaaagagctagcgcgaatagtcagtcttcgatcagcacgaagcgcatgcatgaccagggatagcgcaccgaacaatggtcgccggctcttcttggatatcggcgcgtgctcgcattgtccgcgggcctgacgatagcagcgtgaactcgcgtctggacgaggcggtcgggagccgcagctgcgcgccgagccgctcgagcagtaccagattagggccgtcgagaatcgtcgtcgagggcgcagcgatccaagcgcacacaagagcgtggctctggcggaggaggtcggtcatcgggagacgctgctccgagtcgccgagcgcccgctcggtcgaggcgtcgggcatggcaatgtcgaccgccagtgggctcgctggctggcagcgatggaagtaggccgtgattcatcgcagtcgtcaaaggtgacctcgtacattgattgccaatccgacgatggccgagggccgacggtgggctggctgagactcggccttggagcggggcgggcgggaggccgtgcgcagtgggacgtcgagcagctcgcggcaatcgagatggggcattggcggatgctcgaggaccggatgaagcctcctgtgaagtgcagacttccggttggatatcggtcttgacagccggtcctggtcggacgtacggggcgccgacgagccttggaccactcctgtcgccctgttcgcgaggtcgccgcgggaggaggcgagctcagctcctcggcatgcctgctctcttgcgagctggacgacttggtcgccgatgttctctaggcagctgctacttacagctgtcagccgtcgtctgatctcaagctcgtgggttgaggtagaggccccgatggcggaggctcgtagcggctgctgccctcggtcgccagctcgatttgttgcgccgacagctccgaggtgggcgacggcagctttggtggaccgagatgagcgcagtatctgtatcttttacgacagtcaggtcctgcgtgcgagcaaaggatagagatggacggcgtcgagggtggtcgtctagcgggaaaggacgtcgcgcgagctgcgaccgagccaagagaggcgcagcatctcacccccttcggtcgtcccaaccagcacacggattatgttgcctctccttcaagaggaaggccagaggctcttccatgccattaccggcctcgctttcctcccagcattatgaggaggaggccagtagaggcaagatggtccgcttgctcgtgcccggccgaaactcgcgcgcagcccttttcttgcgggtatagacgacacggcccgagtaagcagcgtgacctcgagtgccttcgttgcggagagccagagataaaatacatgttcagagaaaaagagagagcagtgtccgatgaaggaagaagagacaaagacgaaatcgagacgcaaagcaaagatggagacaggagcgacccaaggcgagatgtttaggtcgagcgcacgcaggcgcccttgcggcaagtcatattgggcccaaagagcgagcggtccgagcagctgcgaaacgaacgaaagagagtcagttgagagacgacagacgtgtcaggtgagaaggaacgcactcgaccccgatcgggcccgacgagtcggttcggagcgagagaggggcgaggccacttgaaaagggggacgcgggaccaattagttgacaagtcagcgacgatctcagcactgagagaaccagcagtggcaggacgcaccggcgaccgacgacgctgagtgacttctgaccgaatggctgggcggcagagtcaagcgtagctgagaaggcgccgtgccggcaaccgccgcacgactcgagctcggacgacgtgtcgaggcactgaatgcaaggggaagggcaagcaagagtcagctcaagagatcttggaggggagggcggatggaggaggcgcacctcaaagccgttttcggtaccctcgacccggcaggccgtcaggccggcagggcagagcgaggagtcacgtgcgcgagcgcgccgacgctcaagagcggtccggcgacgggcgaggccgctcgcctgagcctcggcactgtggacgaaggctaagaagtcggcggtggcgcacggctgctcggtgattatgccgatgtcggcgaagcagatgcacgcgagcgtgcccgtgttggagtagccaaagccggcctggggaacgcaaagagacgagtcaggatacagttgcgcttgcatccatatttgacgaaaggaggatgcgcaccgaagtccggcacaagtttgcgcaaacttcggcggtcgctgcaggcggctggtcgatccgaccactgatctggtcgcctgttgcgggagagaaagagcggtcagctcgaggcattacaaggtgtcagaagaagtgactcaccagtcccgcagaaagcgccggtgaaactcgagccgacgaagggctcgccagggcagtctgccgtcgctacttcgccgcagctggggccggtgtaggttgattggccaaagacgccgggaagaagcgaacagaccgcgaggccgatcatgacgaagagcagagggtgcgacgagcgagcgggcatgctggaggagtgttggaaggcaggagagaggaagcgagccagggaggggaggagagaatggagtgcgggagatgaggcgaggaggcgggatgaggaacttgacaagagagcagcctgcgggctggcctttatacctttgccagcccggcttagcgtcccgtgtgcgcgcctcatcagggggaagcagatggagactctctgcgatgggatgcgaaaggtcgtcgcgcagtagcagggagacccgaaatgctgggtacgagatcgacacgggaaggctgttttcctcctcgacgagtccctctcaatctgcctttggaaggctccggcgtcaacaaatcgaacttaatggaccgcgcctctgcgtcgcgcgtcacgtctgcgagcgggtcggcagtccgttggcccgcgagcctggcccgtaattggcaggcgcgatgccctgagtcaaacccctacccttcgcatcccagcgacgcgacaacagagcaacttgaagcttacagtcagcagaagatcagcatctcttggaggtcagctagcagaaaggaacacgtacaggcccagccgcccatcgcgacccggcctctatgagcgcgcgtcctttcaccacgcccttccgcaattaagctgcatcgtaccaaggacgattagcctggacagaaagcggtacgcatagggagggtccgtcttgcttgtctcgttcacgcccacaaaggtcctcagcgaacgaggccgaccttctcgctcgtcctgggcgaggcgaccgagaaccaggccgcggcctggacgacgcggaggccgacgccgacggcaaacgtcccgcccgagccgatgacgtcgatcagcgtccgaccgatgagggcgccgaggaagaggaagaagacagaggcggcacgcaggtcctgcaggtcgtcaggagagcgggcgagcgagcggaagttagagcagtcgttcgtgtaggagccaccagctgctgcggacgacgcacgcgagccttgttgcgcttgaggatgaacaactttggctcgttgatgagctcgacccagattgtcgtcaatacgacggccgtcccgaagggcgtgttgagcctcttgccgacgatgccctggaggccgagcgtcgccgaagcgaagccgagcgcggccatcgccatgggcgacctccatgagggatcgtagcgcgacctgtgcgagacgcgccgaccggattcagtctcgtcaaactgaacgaagagagagcagacatggcgtacagggcgacactcggctcgccagcgtagtgcgccaagacagccgcgaccgcgagaaggacggcctggatgacgctcgacgtagcgagccagcctcggcgcttgcaaccccagcggtcgccgatccggccgagcgaggtcccgagcaggaacgagagaagcgacgtgagcgcttgctggtcgggcttctcgaatatggacgtccgagccgcaccgggcgcaaagttgcgagcgacggcaaggcctgtgatgatttgtttacgcctggtcagtctggcccgcttggttgggaggtcaactgaacgcgtgcgtacctagctgcgccacaccgcctgtttgaaacccgcacctggcgttccgaggaagagcagagagcgttcaggggaagagcaatcaacattcagcgagcgtccgagccaagtagcaagcagccagcgaccgtcaagacagatgcaactacggcgggcctgcgaccggaggacagagaggttggtcgcctgcccgcccctttctcgcgagaagaagacgttgcccgatcccgccgacccagactcttgtgcgaccaacgagggatacgcaccagatgaagcaggccgagaaggtcaccgccgaggtgaagccagtctgaaagcaaaggtagatgagtatccacgtcgaagacatgctcgccgggtcgacgtcggcctgccaggctgtgcgcgcgcgcgtcgcgagcgacgctcgagggaggccggcgctgggcgagcgggagggctcgagcgagccggcggtcgaggtcggcgctgaggcgtcgggcttggtcgtcgccatcctgactggcgttgatgacagcgaggtcgagagggaggttggtccgaaggcggagctagcgaggggcggcggtaggcacctcggaggaatgctactgaaggaggagcgcgcgggtcgacggcgacgtttgtgttagtagagctaggacgtcagccataggccgcaggagatccgagcgagtcagagagacggacggacctgtcgagtgctgaatggcgttcggtggatgcttgcggccaagtgccgtcggttgaagaggagcttcgggcaacgccggcgacgtgagtgctggctcggacaggctcggccggtattggtcgtctctgggtacgaggtgtggagcggtggcacgtcgtcctgggtacgtcgtcgttgtcgggacgagcaggaggagagagagggctatttgacaggtcttcttgtgccgaagtcggctgagcgttgctgaccggctggccggtcgacgagctcagctggccctttcgagacgccgcagagcaagcacgccagcgaccgtcattctaagattctcggcgcctaacccgtctctcatcgactgccagctgccagcagtactgacgatccgggtgggagccctgctgaacgctgacctttttccctagacgttcgaccagcgctcggccggactcgctgacgggagttccgccggccggagcctactcgtcatgctcgggcgcccgttctcgccgaccaagggcgaccaagcatccaactctgttgcacccacgaggtcctcctgcttgcctattgcccgccgcctcgagagtcggccgcagccgacgtgtgcaagcttgcaatcggccggacacggcacgcttccagcgccgattcggcaggccgatctcggcccggacaagctcggtcgtgcacgacgtctccacgacgacgctcagagcgacccggaggatccgagagggctctgcgttcgggagaactgcagggcgaccaacatgggtggaaactcggccgaaagacgacggaggacgacaaactgctcgggacgaacccaccagatctcctctaaaggcagggctctcgagtcatcggctcttgcttgttaacgaccgacctcttgcctggcaagatgactatcaccgccgactcgcccgtcgagccgctcttcacgccgtccttcttcgacctcgacctgctcgtcgcagacgccggcgaccgctctctggccgacctgccgcaggcagcctcgtccaccgtcggacccgagatcgactacgtctttgcgcctgtcgctggcccatcctttctctcgcaatcgccgctgccccctcattttaccgtcgacggcatcgcagtccactggccgacgacgctctacatgccctcggccgacaccgtcggtcctacgcagcagaaggcggccacacccggctggccttgggcgggcgccccgcagagcatgaccggtcctcttgctggcaggtccgacgcttcttcgagaggcgaccagagcttgcacgactggctgcgcacgcagggtacgttccttccctcgtctattcgagcctagacaatgcgggcggaagctgacccttcggtcgtctcttccgccgcgtgaccagcctcaactcgagcggcctatccgatgtcggcctatgcgagtccgacggcctccttttccggcctgccgactccgccagaccagcgccggtcgtccctccccttcgagcccaacctcccgcccgacatcctcccggccgttgccgcccgtgccgctgccaagtggcgcgacttcacccgccagcgagccggaccatcgctcgccggcctctcgtccgctttaccatcgtcgccttcacacgccatatgcctcggcgacgtctcgaccggcggcttcggctcgcccgcgcactcgccgacggcgagcagtagcgcgcggtcgtacggttcgacgtcgtcaaacgacgagtggctcttccggccgcacttcaccaccttcccgatccctcaagctagcgaccggcgcctttcgaccgcttcgacagcgagctctgcgccgcttcctgccggacccgccgttcaccatctccagcgcgctgccggccggtacgagccgtatgcaacggctgcagcctcgacttcgacgacccggtgtgggaccaacgcctcgattgccacgacgagcacgacggtcgctggcgtaaatggcgacgcgagcgggtcgaccgagggcaagacgaaggaggagctccgacgggagcgcaagcgagtgacgaaccgcaacagtacgtctcactgtctagtgtcggcctgtctgcgtcgctttcgtctgacggtgccgctcgcctcatataggtgcccgcaatcagcgcgagaagaagcggctcgagatcgagggtctccaggctcgaattgtgcagagcggtcagtctttggcggtccgtcgagcgcgatgggtttcatcgactgacggctcttctgaacttgccgtctgcgcccgccagacgctcggctcgcccaactgcaggcgctcgagcaggtcctgcgggccgagcatgaccgactgagcgcctgatgtcgtctctgcccagcggcgcttcttctcacttcactctttcttcttcgccaaccccagggcagacgtcgtgccaccgacgactctccttcgccagattcagacccttcgcctgctgcattagaccctctcgcccacctgtagaccatgcccggctcctctcttcccgttgtgactcccctagaccagcctctcccagctccacgcctgctgacgccatcatgaccctgagtctcttcgacgaccgccgcaagccgcctcggccagggccttctccgtgagaacgattgcatcgtcgtcctgcgagcgccccttgctggacactccgttcgctttccccttccagttcgcgactcgaagccttcaaccgtagacactgcagtatgaaacgtctgacgggggtcagcatctggcgttgagagctgtagaggagggaggaccgacaggcggaagacgtcgttgaagacgtagtacgtgctgccgtccttaaccagctggaagacctgcgaaaactggagtgggggcgagtcgtcgatctgcaaaggcggacggaagtgacgtcaggatctgactggcataggcgtccacgctgctgccagacggacaatgagctggccggtgacgaggacgatgaggttctcagagccgggctgcgacggctgagcgtcggtcgtctcaatcttgtgctggaccttgccaaagggcaggctgacgaggtgctcggtgatggcctcgccgccgaggaactgcttcacctcccacgagagcatcgacgacggccgctgtttgggagcggcgcaagggggaggcgacgaggggtgagcaagcgcggtgggtcagcttcgagttgcgcagaaggaccgcataccacgcaaccccatccagaggcgccgaggtcgggccggcacgcctctagccaagtcgcaagtagccgctcagcggcgacacctgagggtcgacgagggtcgaggtcatccagccgagctggcagcccggaggcgagaggcggtcgagcaaggctccaaccgaagcgctccccagccagcaccctgcacgatcagatgacagcaggagacgtacgtaaaggtcgatgagccccggacggttggtggcaaacagggagtagtagtactctgcgagagccgccgaccgttcggttgaaaggagggcgagcgaagagtgaagcagcacacggagccgcgtcgaacacgagcgtcagtctaagtcgctgcaaggatgtgagcagcagctgatgcttttgtcgaggacgtcgccaccggtgcagcgcagaacagccaggtaggagctctggcagacgggccaagctccggtgctcagagctgcagaaggaggcacgcacccgtgaactgcttcgcgacggcgttgatgtcggacatggtctggcagatggtggatcaggatgtcgctgtcagcaggcgtactgtgctctctgccaacgagtccaaggcgtacgaagatgggtcggctctcgagtgaggttgagggtgacgagagaatgaggcgagcgacggcgagaaagctcgagcaggcgcgtctgaggcggacaagtgaactttggtgctcgactctggcagatcatgatttaatcatagacaagttctggagtcatccactgagtttcgattgagacgattagaatcccgcgcaaccaggcttcgagccggccggccggcggcgcttctcgcccaatcgcacggcctatcatcttctgtcgacacccatcccgctctctcgctccctcttctcccatcgttttagcccgccatgagttcacaatcgcccgttccgtacaagcagtgcgtcgcctccgtccgctgctcggcctgtcgcctctgtccgagaggtacgagcgtccgcccgggctgacctcgctactcctgctcgccgctcctgcttcccaagggacatgccgccggccaccggcttcggcaccgtccagtacaagcgggcgctcccgttcaagggcccgtccggcgccgtcatctttgccgtcattggcaccatcatgggcgtcggctggtaccggaccattggcggccgcaaggagaaacacgagctcgcacgcgaggagcgttggtcgcgcgtccaccagctgccgttcctcgtcgctgagaacgaccgcgacacgttccgccggaacgaggccgcaaaggcccgcgaggccatcatcatgaaggacgtccagggctgggaggtgcgttagccgtcggcgttgttcactcgctagagcaggagcgaaagcggagctcgagctccccggctccttcttccaggtccgactcaaagactgacagcctttgctctcttctcattcctcgcaggtcggcaaactgccgtaccacaccaagcgctacgtcgcaccgtctgtcgtcgtctagagcggctttcctcttcccggcgtcggatgcgccttcaccgggcgacctcgtctcacctctcttcctcgggccgacctcctgccctgccgaccggtcacctggtcgacggcggtccgcacgccttttcgcacatatctcgatggctgtctctcttcgtcatcggcctttgatctggcggctgccgcctggctgcccacgaaggactcggttcgtggtcagccatggcctgcctgcacggcggcgctggccgggaaggacgtcaagtcgcttgcttccactctctcccgcttctacgctcgacgctcgcagactgcccggctgccggcgacgctgaccgagaacgagaaagcgaaagcaagcaaggtctcatgctatgcgcacacggcctgcggtccaggaggaagggggaggaagggatagggttgcaggagaaagcgaaaggaaggagacacatcagatcaataggagggccggtttttagatcttggagatgatggccgaggtgaagtccgaggtcgaggcctggccgcccatgtcgccggtgcggaccttgccgtcgcggctgcaggtgagtgcgggcgtaagtgtcagtcagcggcgtcgcaaagggcaggcagcgaagcacgcacatgacgtcgtagacggcgctggcgatcgagttggcctgcgactcgaggccgaggtggcggagcataagcgaggccgagagaaccatcgccgtcgggttggcaacgttcttgcccatgatgtccttggcaacgtgccggcatccgggctcgaagagggcgtactcgcggccgatgttgcagccggggacgacaccggggccaccgacgagggcggcgccgacgttgctgatgatgttacctgaggaagaaagggtggggaagggtcagcgactgaagagcgatttagggatccagcgacagaagggaccgaccgtaaaggttgggggtgaccatgacgtcgaactgctggggcttggcgacgagctgcatcgacgtgttgtcgacaatcatgttgtcaaacttgatgcccgacgactcgtactccttggcaacctcctggcagatgcgaaggaagaggccgtcgccgagcttcataatgttggccttgtggacgcaggtgaccttcttgcggttgttcttgagggcaaagtcaaaggcaaagcgggcgatgcgctcaatcttaggccgcgacgagaccttgagcgactcgacgacacccgggtacgactggtgctcaaggccagagtactcgccctcggtgttctcgcggatgatggcaaagtcgacgttgtcgtgccgcgtcttgagaccggggagcgacttgcagacgacgaccgaggcgtagatgtcgagcgactggcgcatcgcaatgttccacgagttgtgctcgttgggacccatgccggtcgaaaggatgcctggcggacggagacggcgagcagagcaacaaagcatcagtccgcaagctcgccgtgctcgaaatgaggctttatcgacgcacccttcagtccgaccttgttgcgcttcaagctctccatggcgctctggaagagcgtgtcgtcgccgccagtctcgcccgagacgttgtactggtcaaacttgaccgggacgttgacgtgctcgaagatctccttgaccgagtcggtgagctcggggccgacgccgtcaccagggatgagggtaacctgcgaagggcaagggcagacgcgacggtcagcacgggaagctcctccgccgaccggcaggccttcacttctggcgaagagaacagccgaagaccggaaataggattagacgcacagtgtagacgccgccgtacttggtcggaccctagagagcaagcagtaagacagagatgcgggcatcactcgaggacaggtcagcgatcctgcgacacttttcagccggtgcggccggtagatgccggcccggccgttgatgttgaccgagccggccaggctggaggacagggaggcagatgaggacgcacccgcgacgagatcgtgggcagggcagcgtacgaccgggcggtgggctggcaggaaggcaaggacaggttatcgatcagccgggccattctttgctacgagagagggaagctgtcgctcgacgacgcggtgccggcccttctcgagcgacggctcgtcaaaagctcgcatgacgcaccttggccgcagcggcgacacggagcgtagagcggaacattgcagaaggagagtaagagaaagaagacgaggaggagagggcaatgggtgagggaggcagggcaacgattcgttcggagggcgcgaggggcgtttgccctcgccgccgcccgtcgcgcgacgctttcgcctgccgcacgccgggcgagctggcccgacggccgacctgtcagtcgacccagcacccctccacatgcaccccataaagccatcgcgggcgcgttcagatcgcaaatcttgtcgctctactcttagctgctcactgttcgtggtcgaggtgacggttcagttgtcgtcagcgtcgccgaaaccggccgaacggcgccgggcgcagaaacgcgcgcgcgcgaccaagcccgaggaggacagcctcgtcgacgaccggccggcggtcggctcgcaagggccgtcgtcgtccaacagagtgctgctctttcgtccagcagcacggccacaccttcgcgaccgacactcttcctgcatctagctcgctgctgaccccttgacgtctgctcctcgctaagtttgagcattggagcgtctctttgaccctcgcaacaccatctctcgctcgacagcaggcgatgcgagcgggccagcggtgcagccatatgttctcgaacatgctcctcaatttgcctgacgcctcgatcactgcagggtgtcagcccgtgacgaggccgccttgatgcagagtttgcaagcagggcaatcaaccggcgctgggctgtgaccgcggctgcacaagcttctcagctactccgaccgtcacatgattggctcggcgtgaactgccgcaagggcgcctgcgtcgccaaccagacgcctcctactttgcccctcaatcgcctcgttaccctccggcactcatacttaacgtccttcgagattgctgctcgtctccctcgccctgccctgccttatcctgtcttctttcggctctttggtgtctctcgctgtcagcatgtcgcggttgccaggaccacacctctcagccagctgtctcttctccgctcgacgtcgcctgctcttatccagcgtcgccgtcgagactttgcgccgccgcaagtgcccttcgcgatgcgtactcttcggaggccgccgtcgtcggcgcgcgcgcctcccagcccgtagggcgcagcggcaagccgagcgactcctccttgtccccgacgaccccccctttgcctacaagcaatatggctcttacaaagaagacggcagaacgctcagaaagctcctctcgctcgacttcgaccggtacgtcgtcgtctggcggccgtctgagtgcggtctcgcgcgctggcgggccccgagctcgattcgccacatttctcgttgctctcctgtcccctttgaccggccggctcgcctcgtccaagccaaaagctgaccctagccgcctcgtctccagcccggagcggaacgacaaggacttcgagccggtcgacacctgcgacgtccgtctacgccgagctctcgtcgtcggacgaggacgtcccgctcgccggcgcacgggcccacaaagccaacgccgtcaagcgcgaggccgacgaggacgagaccagtggcagcgactgggaaaaggacggcgccggcggagacgagagcgatgaggagatgatgctgcaagaggcgattcgggtgcgtccttcgtctgcgaaccatgacgcgcgggcctcgccgtctccgagctcacgctcgaccgcctttcatttgaccctcagctttcgacccagcgtgcggtagccggcaacacgttcaccaccctcgctgccgcagacaccgtccggtcgtcgatcaacccagacgtccagcgccgggcagcggcggccgaggctcggctctctgcccgcgggcccggctaccggattgacgtcaagcaggaggaggtcgcgctcatgccgccgccggcgctgccggccttctcgcgcaagcccaaagccgccgtcgtcgctacgaaggtcaaggggaaggctaccgtcaacggccgcaaggtgacgtcggccgccgcggccaatgccggtctcaagcgcaagcggccgtcggctgctgggagcgacgacgagggcggcttcgtcaaaagcgagccagaggacagcgacacgtttgtcgacctccacaacggctcggacgacgacgatgacgacgacgacgacgacgactcgctctcggacctcgactcggcctcggacgcggcgtcgtcggtcgccagcccgtctaatgcaaaggcggtgcccaaaaagctctcggtcaagcaggaagcgaagaaggtcaagaaggcggccgagctggcgggcctccacgcgcagtatgcggccgagctcgaaaagtcgcgtcagacgcaggatatctacaccaagaagcggctgtcgaagctcgtcaaggcgatctctgcgatcgagcaagcgtcggtccgcaggaagcaggccaagctcaagcggacgctcggccgcaagctcaaccagtttgaaaagaatcagatcgcgctctgggagtaccacccggagctcgagaccgtctggggcgatctcgaggccgacattccgatcgtcttgcccgtccagatgccggcgccgccgggccttcggctgagcctcctgccctttcagcgcgagagtctctactggatgaaggagcaggagaagggcatctggaagggcggcatgctcgctgacgagatgggcatgggcaaggtccgtcgtccgtcgttgtctgcgctcgggccaccagctgacctcccctttcttgccccttccgcagacgatccagacgatctcgctcatgctatccgacaacaagaccaaatcgggccccaacctcgtccttgcgtgcgtccgacctcgttctcgctcgtccccttcgccgcgtccgctgacgacgatggcgccgcatgcaacccctttagcccggttgtcgccctgcgccagtggaagtcggagattgagacgcacgccgagggcctcaaggtcctcatctggcacggtgccggccgcggcaattcgaaggtgtccgagctcaccaagtacgacgtcgtcctgacctcgtaagtcctgctgtcctcgtcttcgggcctgctcgccttcgctgacgaatacctttatccgccccagctacggcacgctccagagcagctggaccaaggagtccaaaggctggaagcgcggcggaaagattctgaccgaaaagtcgctcgcgcacaagattgactggcaccgtatcatcctcgacgaggcccacaacatcaaggtgcgctctcctttctctggcatcgcaagccccctggagctgacgaactcacattcacaggaccgcacgaccaacgtcgctaaggcctgcttcaacctcaagggccagttcaagtggtgcctgtcgggcacgccgctccagaaccgcgtcggtgagctctactcgctcgtccgcttcctcggcggcgacccctactcgtactacttttgcaaaaattgcccgtgcaaggtgcgtcgctccagcttccgcccggtcaacctgactcgcgactgaccaatttcctctcgctttccgtcgcagtcgctgcactggcgcttcagcaacaaggccaactgtgacgagtgtggccacagcccggcgatgcacgtctgcctctggaatgtgagtcgcgcctgccaacatggacgcagaggaggaagctgaaccctgctgctccttctctctcagaacgagattctcaacccgatcgtcaagcttggcacgcacaatggctatggcaagatgggctggaagaagctcaagctactgctcgaccggatgatgctccgccggaccaagctcgagcgggccgacgacctcggcctgccgccgcggacgctcgtcgtccggcgcgactacttttcgcccgaggagaaggagatctactcgtcgctcttctcggatgtgaagcgccagttctcgagctacatcgccgctggcacagtcctcaacaactgtctgtcttgctcttctggccgcttttctccgcctgcaatcgctgacgctgctctccgcgctcgccagactccaacatcttctcgctcatcacgcgcatgcgccaggcctcgtgccatccggaccttgtcctgcggagcaagacggcacagtacatcaaggacctcgacgagacgacgctctgccgcatctgccaggaggtcggcgaggacgtcatcaaggcaaaatgtggccactgctttgaccgcgagtgcatctcgacctacctcaccggctacggcgccggcgacaagggcggcgcgccctgcccggtctgcaacgccagcttaacgatcgacctcgaggccgatgcgattgacctcgatgagacgaacatcaagaaggcccgccagggcatcctcggccggctcgacgtcgccaactggcggtcgtcgaccaaggtcgaggcccttgtcgaggagctctcgaagctccgggccgaggacgtcacgaccaagagcctcgtcttcagccaatttgtctcgttccgtgcgtgctcgtcgctgctgcttgctctctcctttggtggcgtcggctgattgggtccatgtgtgctcgacggcagtcgacatcatcgccttccggctcaaccgcgccggcttcaaggtctgccggctcgagggcggcatgacgatggaggcccggcaagcgacgatcgacaagtttaccaacagccccgacgtctgcgtcttcttgatctcgctcaaggccggcggcgtcgccctcaacctgacggaggccaaccgcgtctacctgatggactcgtggtggaacccggcggtcgagtaccaggtgcgtcaccgcgccctcctcgctgcggagtttgcatgtcgctgacattctcgcccccccccccctcacaggcgatggaccggatccaccggctcggtcagcaccggcccgtcaccgtcatcaagatggtcatcgaggactcgatcgagtccaagattgtccagctccaggagaagaagctcgccatgacggacgcgacgctcaactccaactcggatgcgatgggcaagctcacggccgaggacctcggcttcctcttccgcctctgagtgacgcgagattcgggcccgctctctccttctcgtaccagtataccgcgcgccagccgccccacgatccgcctattttctctctcttttacccccgggacacaacctctgcccttccgcttccttccgacgtcgacctctgcgaggtcttctgcgttcgacgcaatcttgcaccctctcccgcccgacggctcagaaaagcccgcgcgctttcttctcagagcgtccgcggcgcgtgcccaactcttcttctttaacgatcgcaatgcccctcttccatcggactgcggttcctcctctttcgcgattgacggttgaccggcgcgtcggtcttgactcgtcgcgtcacttgctcgaaagccggcgcccgcccgacacgcattgctgatggcctgctgcccggccgcgcgctcgcccgtcctcctttgtaaccgacctcgcgccaaacagctcggactcggagccgacctcagcccaccgcgacggcgcgaagacgatctctcttgacggagtcctcgctggcgtgcggttaagaagcagatcccccgtcgagcgatgccttctcacctacccaccgacacgcttcatcagaccgtctcaccatggccaccgccgctaccaccaccaccgccagcaacgccgccgccgccgaccgcctcgccgtctcgtcgctaaccaccaccggcactccctccgctgctaccgcacccgctcggcgcgagccgcccgtccagcaagaccactggaccgaccgcgtcatcgatgcaatcagcctcttcggcaaggcgatcggcggcgcgtcgacgagcgagggccgcaagctcggcaaggagcctacagcggcgcacgagcgcaccggcggcaagcgctcgaccggctaaagcgacatgtcgtcctttgcgcacctcacgagtcggaaggccgctctgccccatccgagtacataaacatgagtgagtgaggctgctcaaccatctttctcggcctgactgacctctctgcgcgatccctgccagcgtcatcgttaccggcatgcggcgcgacacgtcggcgctgcccgccactctttgcgccatcccatcgcaaagcccgtcgggccgacggtcggctcgtctctcaggatgatagccggtgcacgcgggtgcttgggcttcttcttttaaaggtcgttcgacagacgccgattcatgcccgcctgaggatctccactgtgctgtctcgtggaaagacatcagcgctcgtccctctcagaaaggtgctcaacgggagactggaggaggtgcgacccggactctcactcaagcgcaacggaagcaggaggattcggcaggatgggtctgacggtcgataagattgagtccgcaggccgtgttttcgcgagctcgacttcagccgaccttgacgctcgacgtctcgtctcgacgcccagcaagcacagttggacgcctgcccttctcggcgtcggtagcgttccatcgtcagggcgtcatctcgtctgtccggcggccggcggccagctgccgccaacgtcgtgaccggcggtcggtcgacccgcgtctgccaagcacagcccatgccggagtcgctgaacccaccgcgtctgttccgtcgagctctacaagaaggagacgtcccgatctcttgagccgctcggtcttgttcccttcccatcgccatctcatcgatgtccaactacaaccacaacggctacctcgcctcgtccaactacgccagctggcctacggcgccgccgtcgaccttcggcagccatccagcagcaccgttgaccgagacgctcccagcccacaacgcctcgtcaacaccaccggcccgctacgagccgccgatccagcaccactggtcggataagctgtttgacggtctcggcaagctccttggcccagcgcactatgccgaggctaacctcggcccggcctcggcgacgcttcacaaggaccacctcgcgtacaagcgcgagaaggcagagaagaaggcggccaaggaggaggccaagcaatttggctagacgtcgagaagcctattgcttcttctctgtccgtgccttgcgccctccccggagcaggctggtcaggtacgcgtcttcctgggccgtgatcccctgcagcagtactccttctgacctgcagcgcgttcacctcctcctctgcagctacgcgagcacccttaagcctcccgggctcattcatgctcatcgggctgctgcccgcgcttgatctgtcgctcgccggtcgccgctcacccgcttcggcgccgcgctgtacaggaccttcgtggctagcgcaactcgtcgttagcaacctgcgagtgcccttcttgataatcttggctgcacccaaagctcgccgcgagcaggaagagacgaaagaccatttcgaatcttgcaagcctaaccatgccggcaatgggggcgctacgacgactcaaccttgttgttttcgccaatcatctcccagtcggcctcttcgttcgtcgtcacggtgcccggcgcagccgccgcgagcaggtcggccggctttggcgcagccgacgacggctcgggcgcggtcgccgtcgtcgtcgtcgtcggtgggtgaacgacgatggagggctgccggctgcgctgctcgccggcagcgacgctcgtctgctccgtcgccgtcgtcgttggggtcgaaaggccggcggcggatggcgtcgcgtcgcgcgcgacctcctccgctgcaagcgccggcttggtcgagcgagcctcacgcttgacgggcgcaggaaccgtcatgccgagcattcgagcgagcttctctggcccgccgagcttgaagaagctaaagctgagggcgacgagcacgtcgccgtaccagcctacgcggccgaagaaggccagtgagggcgcgaggtggaggaggaggaacgaggcgacaatgtagttgagcgtgagctggacgaaaagccagccgaggaggtcgtagatccgcttggcgagctgccggatcggcgaagccggccgatcggctgacgagagcagcagcggccggacgttgcgccggaagagccggccgagcgaggttaggagaccggcgtgcacaaaggtgactgtggagcgacgcctgtcagtctcaagcaagagccgccaggtctaggcaggaaaggacacacagtagtagccgatttgggtgccgtgctgtacgagggagcgaagagggagggggtcagtgggcaagaatgaagcagcatccggcaacaagaaggtcgtcgcacccagaaggcgctcgtcataaaggtaatcatgctcgactgaaagccaggcttcttgcccttcggtgtgacgcgcttgtagacgcactcgcgcagccagactgaagggcagaaggggtcgattcagctgtgagtttgacagcgtccatcgttcggagagcaacaccaaccgctagtgcgcatgttccagttgtcgaagctgcagcggacgagaggagaaattgggcgtaaggttgctggtcagtgccgcgtcgcgaaacaccggctttacgttgcgccctgtcacccggacgcacaggaccttgtagttctcggccgtctcgatccggagaatgtcgatgttgcggcaacggttccagcgcgtgcggccggtcgtcgggtcgtagccgttgaagccgagcccgcagaggatgatggcgccctgaacgtgcgaaaggggtccaacggcgtcagctgtcagagggtgcgacaccggaaccggtgtgatcgcgcacctcggtcagctcccagacgccgtagtatttagtgcgagcgacgaagccgcaggcctggacgtagagcagcctgttcgcgcgcgcagccggggtcagcgcgatccgcaagccctgcgccgatcacaccgggaggaccgacttgaatgcgagactgtagcccttccactcgtcggccaagacgccgctgtagctcgccttgctgccgaggaaagcatagagcccaaggaaggcgacgccgacggcgccatggacgtaggcgacgcgcttccggccctttgggatgccgcgcttgatgacctcgggcgagttttgaacgtcctccttgcggaatgacgacgtccgcttgatgagcggcacccgggccgtcccctcgacggcagacgatgagccggcagaggaggtcgcaccggcggtcggcgccgccgccggctgctgctgctcctcggcgtcgacaaagagcttgccgttgacgagcgagtggtagagctggaagtcaaatgacggcccgacgaggactgatgggaagaagagggcatagccgaggaacgagtgaaggccgggcagcttggtgagccggctcgcacgctgggcgtcgtcgagctcctgagcggccagcacgtgcgagagcgccggggggagatggtcaaggacaagtaggtcagcacgcgtcgggttcgagcgccaggaggcgcaggacagacgttgatgtcgcgtcggccgtcgtagacgttccaggcaaaggacgagagcttcatgacgagcaccatctgcgagcccgtgatctcgatgacgtcgggcgagatctcgtacagtgtccggtagacgtggttgaccgtcaggtggcccatcgtaaaggcaaagacgagccagggcatgcgctcagtccgattaaagacgacgatcaggtaggtaccgacgatcgagacgagcagctggaggaagccgccccagagcttcaggacgccgacgaggaagaaggtcgcgacgaggatcgaatagtagtggcgcgtgccgtcggtcgggagcttgacgtatagcgacgagagcgggtaggccgccagcaggcagaagacaagctgccagagtggggacgaaggaggtgtcagcccattgttgcctctcgctaggagggagcagggcggagaagcatcatgctcggtcgaggccggcgagggccagcagcccaccccgggccgatgggcgactcgacgcaccttgacatagtcctcgggcgtcgacagcgtcttggagagaaagcggaagaaggggtcgagcatgcgaccggatgggggcaggcgggtctgctacggtgtcgaagcgggagaatgctggtggttggcggcgaggctgactgtatggccggagctcgggccaagtcaacaggcaggcgcagctcacgaggtctcactgcgatcaaggaacctcggccagccttgcacagatctcaggtcgcttgcgtccagggcgctcgctcggagaagaccaaaggagaagggtcatcgtcgtacagtcgggccgtcgttcggcgctcgggcccagccctgccggccagcacccgtgacgccaaccgcctgccccctgccggccgcacccttctagaagaatcgccaccagacaaagacgatgatgaagaggctgacgacgccgacgggcgcgtactggcgaatgagcatctcaagattgatgtttcgcgcctgcttgcggtacttgagcgactcggaccggagcgaagtcgaaaggtccgacatgcctggcgacgacggggggcaatcatttgtcagccgaaagagccagggaagagaagggtagaagcaccgagaggggggcgcacgatccaagctgtcgcctcgccaaaggaggtcctccatgtttttcgtcatgatgcgcgttacgtcctggagctcctcgttgatcttgctgaggttgccggccggaccggcctcggccgtcgacggtggcggggccgagcgcgaatccttatactggcgcgtcgtcttagacatgaagttgtctgcagaagcagcagtctatccgcggtcagcctaggttacaggctgctgaaaccccggcccgcaagccagcggacgcaccgaagccgacaaacgcatacggccgctgcgtgccgtcaaccttactgccgtaaagtttgtcaaactcctttgcgagctcgtcgaggtaggcaaacgcgagcttgcgcgggtacgacttgtcagtaatgacgaggtagatgacgctcccggagacgagatagctggcgcaagagcagagggacgaggtcaggcacgtgctctggtaatgaacaggggcagcgagagcccaggttcgacggactgcagagtataggcgccgctctctatcgagcatagcggctccgagttgggcgacagccggcggacgatgagcttggcctgctgcttgtgctccgttaaagtgttgtcgacctggtcaacaagacgaggccacgtcagcttgccgtgggcaagggagagggacgcagagcagagcaaagggcgggtgacggaccgactcctcgtcaacacttgccgccagcggcaggccatctgagacccgagagatcgtcgtcgcctggttcggtgagcaagccaagaaaggcgtcagcgagggactggttcaggatgaaagcaaagctgctacgtacgaggaccatggcagaagataagggaggctgaggcagacagccgggaggagcacggagagaggtcggctgcggttcggtctggcgagggggcgagcgtgagctggcaggcggggcgtgctcttgagctgagcgtataagttggcggaaagggggggtgggcggtccgacacgaaggccttggtgtgacgtgagagagtagatgaggttgggaaaggcggaggcacgagctgatgaaggttagaggtcagagggaggcgagggctgctcggacgacgaaggggcgccttggcgaggcacgagttgcgcggccgctgcgccgttgcgaggactgatcgcccctgcaccgacttcgcactcgcagaggtatagagtaaggaacatgtagaaaagggcagatttcaagaggcgagcgaggtcggagccgcggacgaagacattacaggaagaggggcaggcgcggcgaggcagtgaggggagacgggcgttcatagacattttcgttgaaaggggggcgaggcagatcttgcaacgggcgagcgatcgggagggaaggcgagccaacggggtttactcggaggccttcttctgcagcaacgacacgcagcagggagcgattcggtaggcacgtcagcgctggcctcttttgtcgggcaggcagacaggcagcagcaaacggaccttgctcttgcgcttctcggcaccggcaggcgtcgacgacgggacttcgtcggccgacttcttgctcttggacgaaggcttcaacttcttagccggcggcgggctcggggccttgggctctgcgaagcgcagaacgtggaaaaagggcacgtcagcccgctgccgcagcgcacttgcagcgagcggtcgaggagactaaccattgtcagagtcgtccgactcgtccgactcggcgttatcgccgacgacctgcgaggcaacctcgtcgtcctcgtcctcgtcatcctccttgtagtcggcaaaggcagtcgccggcatgttggggatgcgaccctcggcaatcgcattcttgtaggcctggacgcgctgctcgtagacgagcatgtcgcgcttgtggcggtcggtgtacatctgcgcagagtacagtggcaggcgtcagtcgaaggaggtcgaccggaacgacagagaataagtgaggataaaaacggacctgcttgacctcgtcgtcgagacccttccacttctcggcgacgagccggagaatgtccttgtacgacttgtcgcggtggaggtcctggacctcgttcttgacctcgttctggaactgaaggtaggccgtcacgggccgcttgggggcgttggggtccttgagcgagcgcttgcgcttcttcttgctgtcgtcgtcgtcgccgccacgggtgtgggacgagagcgactggccggcggcgagcatctggaggagcgcactcaggtcggtcgggttggcgagggccgaggcatcggcaaaggcctggacggtgtcggcgcacgtgcgcatggcctggccgacctggatgaaagagtcgatcatctgcaagggagaggaggcaaagtggtcagcatggcttgagctgatggtgcggctgcgggaggcggctgaaggggtcgaaaggcggagttgtgcacgcagcgcgcgcggctctccgccgtcggccgcgcgactcggaagacgctggaagaagaaggggggggggggcacgaacctggcggcgcttgatgtcgagctggtccttgtcgacgacgttcttggtgccggactgtaagagggtcgtgacgagaagcggcgaggggaggcgcgagagagtgacgcgagtcggacggacgcgtccggtcggcggcggcggcgagaaggcaagagacggaaaggtggcgtgtcgtcgcgggcaagatggcgagacggcgacggataaggcgagacgaggcgggttgtggacaggagagtgagaggagaggtcatggtccagcgatgagtaaggcgaggagagagggcggacgcgtccagacgcaccatgcttgctagtgaaggcgcggtttgtgaaaagggagagtggaaagggcagtagtgagagagggacgaggtttgtgggaaggctggttgcattggagtttttcgcagtcgaccgccagtcgcggctgacccggggcggcatcgcagtcgagcggagtgttcgactgtggccggctcgaagccttcgaactacgcctgcccgactgccatcccatcccgtctctcccgtccctaccctcacacgtcgaccctcctgcagcagccagcagctcccctcttcctcctacacgcactcgaccgccaggtctccactctcgtctagcctccgctcgcacgccgacctctacttagacatgagcgccgccgccgcctcgagcgccgctgccggccgcgtccgaaaggccctgaccggaaacactctgtaccacctgcttgcgttcgtctagccatcctaggccagtcggctggctcctgctcgcatgccgagacgtctggctgacccaatctttctcgctttctctcctttgctgctggccgtcactcctgcccttgtttcggctctcgccctcgcacgcacgacccggcatccgacctcgctctctcgctacaggaagctgccgaacaatggcgtcggtgcccgggtcgcgccgataacgtgggcgatcaacaactcggccaactcgtactacacggtgacgtcgtccaagctgcactgggtgccgcggctcaccgccaacggctacccgctcgtcctagttgaaggcgaggtcgtccccgccgacgaaaagtactctgcgatccagtacgagaaggcccggacgcggcgcgaggagctcatccgggcgacgcgggctggcgaagagcttgatgatctcgacgacctcgaggaaaaggaggttgagctcacgcccgagcaggaggaggaagttggtcgcaaagctggcatccttaagcccaggggcgaggcttacggctggggcatctggaacggtgcgtcataatcttgaggctgaagcgagcgacccagctggtcgtcgggcagcaggcttgtccgttcgactgagcccacactcgacgctcgaggccgtcgatccgccagcagccgctcgcccgtctgtgcaacgacatcgcttgactcttgctgacgtcctgcgctgtactctgatctcttctcaggccagcccatggagcgtctcggcaccgaggccgagccaaagctcatcaccgagcacgccgtcaagtacaagtggcgcgaggtctctgacgactccaaaattcacctctacgagctcagggtgtgttatctgacctccgagcctcagcttgcgctgctggctgacccgtcctgtttccttgcgcgtggcggcccccttaccagaggatgatgccgaagcagcacaagcgctccgtcaacaagattgtctgagggagcggttgctcttactttgcatgcctggcggggtggcagtccactcgcagatcgcatgcgttctcctttccgtcggccctgcgttttgagagagaggcgagcaacggcgcggcctgctgggtgccgctgttgcttggacgacaggccagaggtcgctgccagaagatggcgagcgttcaggcaaatatcagcacccctgggttggtcagagggagggcgtcgactctcaagacaatgtcggccgaagtgaaggcgcaagacgcgcgtggctggctggcagcctccggccggcaacccggctcgacttctggccggctccttgcttgtccagacgaccatcagcatatatatctctctctctccactccccttactcaaagcgacacgaccccggacgcacgtacactcagcagcagaccaatctccgacctccgatcttgtaatgtcgggctctcagaccgagagcgaagacggtgtcgatccgttcctcgtcgcgtgcgtttccgggccgccgcctcccgcctcgcccgccgagcacgaccgactgatgacgatggagcccgctacacctcgtgcagccaattcgaccgggcggtcgagctcgtccagacgctgccaaagagcggcccgatccagagctcgtacgaggagaagctcgcgctctactcagcctacaagcaaggtgcggccgagcggccggcgccccctccgaggccgactcctggcgtcctgaccaccattctctttgctttggtccacccttcccttactagtcaccgagggggacgtcttgggcccgcgaccgggcatctttgagctgctcgcacgatcaaagtggtgcgtcgtcgagcagcggctcacaggaggccggccgtcggaccgaggcgcagctcgcgagccgagctcaagcctgaccctgctacgccaacctcgaaacgctctagggatgcttggaactcgcgccagagcatgacgaccgacgaggcgatggcggcctacgtcgacgtcctgctgaaggtgcggccgagagcagccgctggcgagctcttgatccggcaggttgtaatcccgtcggctgaccgtcgaccttgcctccctcaccgacagatgctcaaacgctacaaggaccgccaagaggcgagagacatcatccacgagttccggcaggcccgggcgatggctgcctcgtcgagctttgccggcagccaggactggcagtcgaccagtgcgtcctccgctttcttttcgtcggccgcgcgagcacgcagtcagagtgcgtccccgccagaccgatctgacactccttcaacactcgcaggctcctcctctccgccgcggaacgagcgctcgcacggacggatggcgtcctcggtcagctcgtcgtcgacctcatcttcgccaccggcgccgatcccgccgcatctgccctcgctcacgccttcgtcggagccgacgcctcggccgacgccagcccagtcacgtctctttgagatccccgacccgaggcttccgccgccagacctcagtccgccctaccagaccaaccgcctgccaggcacatcggcagcatccgcttccggcgccgacaacaccgaccagccgaccgtcttgccgagcagtccaccgtctcgcgccactgctggctttagcgggcgaagcctcccgctaccgatgcctgctccacctcgtgcgacctcggtcccgcctccgccgaggtcactcacgccgccactctcgtcaccgccgtctggagcgaccgccactctggcgccagtccggccgatgctcctgtcgacgacgtcggtcgactcgcaggccttttcgaccgcgctcgagcgcatacaagcgagcctctcggccctccacgagcggctcgagtcgctcgagacgaccaccctgcgcgagcagcagcgggccaatccgctccggacgctgctcttcccgccaggtggcgggcggcaagttggcatcctacggctgctgtggacgctcgccaagcggacgtttgtcgacgcctttctcgccctgacgtgcgtctcggtctggctgctcgtcaccggccagcgcggaatgcgccggtcaagcgtccgcgacttctgggcatcgatcgtccagctcctctggcgccggtggcagcagccaggccatctcttgcccttaccggccgctctttcgtcgcgcaacaggatcaagagcggcagtcgcggagactgctagggccggtgtcgatcgaagagtgtgttgtacgagacagtcgacggatgtaaagatcagttcaaacgattccggctcaggagctttgacaaagtcctctttagcgaagcggaccgcataaaagggaggtgggtggaccaaggtgcaggttcgaggggtccaagtgcccggacgcgtgcggggcgcgagagatatatacttagacgggcgctagatgaatgggaaggccttcaagtatgacgcgggtccgacgccgagtagttcaagaaggggcgagggcgaggcgtggtcagcggtcgtccaaccctcatctcgcccactccttcgaacgacgctcgtctcgctcaacctcctggcccagacgcgcacaaaaggagctcgcccgcccacccacgacgcgacgcgaccgtgaccgactgcgagctgctgctttccggaccctgccagcctcctgcgagctcgaatccgtctgctagcctcggcctgcctcctgcttcgtcctgtagccactccctccttgcgcccggcacgccccccggcgcgctcgctgccgaacgatgaacgccgatgaagtcgccacgatcgtcgacgacgcgcgcgagaactgggccgagacgccctggctcatcgactggctcattcatgccctcaaggagacgcctatggtccgtcccctccgcttccgctttcgcactagctatcggcccctccctagctcgcaagctcgcccgacatgcgctaacgcgccgctctccctctgcagcaaccgggcgaggacaaggactcgttcatctccagccgcggcctgactgcaaccgacgaccgcgtctcgagcctcttccgtggcatgcaagacggcgacggggccgacgaggctccattcgcaggtgcgtggcaaccgttcgttttcttcttcccctctatctcatttcctcttttcatccactacaccttgcgcgggaaagcgggagggtacggaagagtaggaagggggacaaaaaaaagggtgcccagagctcaaggctcgactgaggcagaaggtaccagggggccgcctgttgcaaaggcagggacgggctatgacccggggccggccagggcaagcgcgggcacaggcgggaggaggacgggtggctcgaagcttcttgattgaaactccggtcgcccggaggcagagtcaagaaaaggggggcagccggagttttggcacggagctctcgagctcgcgccggagctcggagctggagctcgcagctcggctgtccctctctctcgaccccaccctcctccccgctggtgtttcgtgcgcactggacgacaacctcggtcgagcgccggagatgcccaggcagcccctctcacccccctccctctgaattctcgacgaagcaactccgatctggagcacaggctctgggttttggagttggctgaggtcggagatcggaggcggagctgagatctcgcaggagctcgcgcgcggagggcagtgtcgcgcgttgacggggtttcaactttctgattcgaaaaaaaaaatgaaagtcgtagacgccaaacacatctccgccaaacacccctcaccgcccaacccttctcaacctcgctcaaccttctctcccacgcgacgaaaagaagagcaaaaacaagccgtcggctagtttggcggctgggcgcgggctaagctcgcttcatccctccgacgagctgagctgctcgagctttctcctcccctccctcccctctcccttacgaccctcctagactcgattcggcctggcacagagcttatcagctgctgacaaaaaccccctcgcctcaaaccaccgcccgttgcagccgaggatgaggagtggccggccgagctgccatcgccagctgcgagctcgccccgctcaccactcgtcacttccccctcggtcgagctcgacctgacctcgacggccgacgaccgcttcggatcgcccatcccagagctcgcgactggctcgacgaggtccgtcttgcgagctcctgcccgcagtgacaagagcagagctgatttcaaagcgtcgtcgtgttcaccagtgctcggcagctcgcgccagacaccagcaggtcggcagcctctctcccctcccctccggcgagcaacgccccggccccagccctgccgacaccacccctgacgagcttggcagagctgtcatctgcaccatcgcgccagcctgctccggccacgtcatcctccaagccgagctcggccggcgtcaacgggatgcagccggcagtgcccttcaacggccggcctcttgttgcttcgacctcgtcacgaccctcaccgccagcatcacggccgacgtctccgaaagcgagcatgagcaaggcggccacttcttctgttccgtcgcgcctgcagaccgatgcgtcgaagccggcctcgtcgctgcctgccgcctcgccgccgatctcgtcgtcgtcatcgtcatcctcaatgcccgcactctcgccggccgagtacacctccatcatccagccgctcctcgacaacacgcgcgcgtttgcggcgacgcccaaaaatctcatcttgcatctctacccacggcgactcgcgacgccggttggccagcgcaaggccatcctaagctcgctccacgcgtcgctgaagagagacagcaagttctgggtgacgtggtcagaatatcacgagggctttggaatcctcgacgagtggcttgaggcagcgcttgcccggccgggttcgccagaggctatcaatggcgagggcacgaccgagctcatcatgtcgacgctgaacgccctgccgtgggacgtgccgtcaatcaagaagtttggccggctcgtcaggaacatcaagcgtgtcaaggagaacgccaaggggcgctacagcaccggtccgtcgatgacccttctgctcgagcaacagcagcagctgaccgccatgcttctctgaacatcatctctcagcgtccgtccgccacgcggccgagctcctcggtgcaatggactgcctgagcgccgccgccgaagtcgagggcgacaagaagcgcaagagctcgctgccgacgacccaagacccgccgaagaagttcaagccttcgtcgccggtcgctgtgctcggccccccggcgttgacactgccaacctcggtcagcaagccgccgatcaagttccccaacttcaagaagaaggcaccggcgacgacatctgcgccggagccggagccggctgcgtcgaagccggacgccactgcgccggcaaagccaaaggtctcagcccagtcaaccatgccgtcgacggcggccagcagcagcagcagcaagccgccttcgaccgttcgggcggcctcgagcgttccgacgacgaaggctggtccttcccgcaagcccagcatgctgaaagagtcggcgccgaccaagcctgcggcgctctcgatctcgagcggagccagccaggctttcacgaaacgacccgaacggcccgagctccagcttaagtttggcaagaagcctcctcagccagcggccgccgctgccggtccgtccaagctcacgtcggcgtccagcggcccacctcgcccttccgtgcccgctcggagcaacagcgggccgaatttcttcgagctcgcgctctcgcagagggtcggaggcgggacgacacccccgccagcctctacgaccagtgcacctcatgctgacggaagcctcaagcgcaagcactcgggcgacgagtccaagccgaagccgaagatgagggtctcgttcgcgccggaagagacgctcgaaagaacgcacgtcttcacctgggtgtgtctcgtctgcctcggtcgaccggtggcacctccggctgactgacgttcgtttgcctcttgcaacagctctcgcccgagcccgaggaccgcgagaacgtccacccgaggccctcgggccaccgactcaacctgcactcgcttgacacgggcgagggtggcgcttacaagacgtcgcacgacctcgacgagggcgcggccctcaacaagacttttggctgcgatctcgacgagagcgactggtttgcgccgcccccgctcctcctcgagcctggcctcgagtacgacgggaagcttgtcgcccaagaacgtgagcgcgaaagccgcatcccgccggccagctacttcacggcggccgatgtcccgcccaatccatccgaggccgacgtcgtcaccgttgccgagtcggccgagacggcccggctctacttcaaccgaaaggagacgcccatcgtcgaacccgagccggcacccgctgccgcgttcgtccctggcgtctacaatccgaacatcgccaatgcgctcgacgaggaacagcttcggcagcttgtggcaaacacctcggtcaacgtgccgcctccggcgctcgccccccctcagcaccagtcgatgccgccgcctccacccgcccacggtttctaccagcggccaccgccgccagcccagcagccgtaccaggcgccagcccatcatggcggctactcgccccacgtgccgtcgtaccagcaccagccgcaccaatcgccgccgcacgccccttacggcggctcgcccgcccaccagccgtttggcgccagctatggccagcacatgggtcggccccagggcgcggtctacatcccaccggctccgcctcaggcgacgccctgggccgcccagcagcagcatcagcactcggacctcgtcgagcccgacaccgggtcgtacggctacccgctcgtccactcgggcttccagccgccaccgccgacctttctcgagcggccggcctacagcgagccctaccgcggcaacaaccaccgcggcggccgaggcggtggcggcggccgcggccgtggacgcggtcgtggccacagtggctggcacaactattaggccagatcggttcaacgtccctcgtcactcttttgtccaaccctttaatccggcccgactcggccaaaactctaacactgcctctcctcgtcgactctctctctctctcttttccagcacatgcctcacgcctgccgcacctctcgcatccacgcctcgccgcccctttacgcgctgaacgaccaccctttagagcctgcctcccctccctcgtaacgatcccccccgcctgccgaagtgaacctctcgcgcccgctcgctcgctcatactttcctcccttgctcgccctcctcctatcgtcctgtccgattgtccgacctgtcggcccttcttgccctcgacctcatcgcatgccccgttcccttcgctttgtccgagatcgacgagtgcttgaagctggtgccggagagcatacatcgactgtcacgcgccaaaagcgcggcgccggcgtgatcgaacgacgccgccctcgttagcccagcctgcaacctccttcgaccctgaatcccaccaatctctccgactacttgacgaacacactcccgctcgcactgtgcgaggtcagagccatcccatgccgtcgtccctcaaacccaacgccccgccctggtcggccaaagtcgccggcgggacgcccgactcggacgcgcccgagccgtcgctcttccctccgacgaagcagctcgcaccgatccagacggccttgggctcgatgtctggcagcagcatgggcagcaaccggccccagtcacccttccggtcgctctcgtcgtcgggcttgctcaagcagcgatcgaccgacggccagccggacgacccgctcgcctcgggctcgagctggccgagctcgagtgcgctgccttcccagtcgccccttgatgggcctggcacgcctggtggtggtcgccgtggcacgctctcgaagggatctaaaccggcggcccgcgcgtcgacctggctcggcaacggatcggtctacacggccgagggcgaggaggacgacaacgacgagcgcgacgggctcctgaatggcgactctgggcgcggccaggatggcgacggcgtcgtcgctgccaaaggcctgcgcgttcacgttctcgacgaggacggcgaggtcctccgcgcaggcgaggctgttggcgacgaggaaggaggcttcggcattacgatcgagcggtcgtgcgtaggcggctcacatcgctggccgacaacctctcgcgccctttggttgacctgtccgcaccttctgcctcgcaggtcgacgcctcagatctcgagcaactcgatcttccatcggccgtcctctccggcgtacgtgtcgcgatcaggccggacctcgcgctggggcctgctccgcgtcctcaaggcccgggtcgacctgtttgcgctccaggctgcgagcctgctcgtctcgtccgtcttcctcgcgtacgtttaaagtcgcggctagcgctgcaatgggcagattctgacctccactggtctctccagctgcgttgtcgtttacgcccttacgcagcagtttctccttatccgcatcccacgactcctgcgcgggcacaaggcgccggcgttcgagtgggaggagccgaccaagtgggctaaggagcacatcgtcaacgacccgggctactacgcccggcagatcggctttgatctcgatgagcgagaggtcgagaccgaggatggcttcctgctcaagtgagtctgcccttggcaggttttcctcaatgtagcccgactgagccgaccttcccctcgttcaccttctagactgcagcgcgtcgtgccacccgccctgccgcccggcgcggttcagagccggccgccgttcccgatcctcatcatgcacggcctcttccagtcgtcgggctccttcatcacgtccgaagagcgctcgctcgccttctggcttgcctcgcgccgccagcaggacccatctggtcaaggcgggtacgagtacgaggtttggctcggcaacacccgcggcgtctttggcatgggccacaagcgctttggccggggcgacccgcgcttctgggactggacaattcgcgagctcgccatgtacgacatgccggcgctcgtcgaggaggtccggctcgtgaccggctgggacaaggtgcacttgtcgtctcgtcgctcgctctctgctctgccgctgacgttgagtccgcgcctcgcccgtcgccgcagattggcttcatcggccactcgcagggcaatggcacggcctttgtctcgctctcgctcggcatccgacccgatctcgggcccaagctcagcgtcttcatcgccctcgcaccggccgtgtttgccggacctctgacgcacggctttccctttacggcactcggccggatggagtggaagatgtggcgccggttcttcggtgagcgggcgcgtgtccttaacatcacgtttctgaggagcgctgactataactctatcaacaggcgtccttgacttcattccgatcatgacctatgcgtacgattacgcgccgcagtcggtctttgtgcgtcgccgggccgagctcaaagcccccttgcgtcgttgactcactgaccgagaccgctacctcccccgcctaggccttcctcggctacacaatgtttgccttcctgtttgactggacggacaccaactggctcgcccggcgcaagggcaagatgttccgcttcacgccgagcccagtgtcgtgcgtcctgctctgccttccaaaggatcgctgagctgagctgacccaacctactcggctcccaaacagctcggcaagcatcttctggtgggccggcaagggcggctttgcgacgcgaaagtgcctctttgacgtcggcctcgaccgctggttcgacgaccgcttcccgccgctctcaatttactacgtcagtcgcccggccgccccgtcagcttacgctcgcctactgaccgatatcttgaccctcagggcggccgcgacttcctcgtactgactgagcctttgctcgagcgactcgagcagaaggagaaggacgtcgaggtcatccgcgtcaagaagatcgacctctcggagcactgcgacttgtgcgtcctgccttcctgtcctcgaccttgtaccgatattgacgagcagacggacgctctcctccagctactgggccgctgaggccgttgagtggtgctaccacgacattgtcgaggacatcgagcggacacggccgtcctgtcccgactcgataccggcggccgccaacgggtttgctcccgagcgggtggcccggtgacgcttcgaccagccttagacgaccaacctcctgttgaacctctcatctgtactactccttgcttccgcgccctgggtcgttcgagcatgacctttgcctgcgacttgatctgggcgacagggcatgcgcaaatggaggatgagggacaactgcgcacggccttgccatccgggcatgacgacgcccgccggctcccatcgagcttgccctctggacaacgacgaccatcaatttcgacctcgaccgtcacacatagacgctagactacacgatggcctttctctcactccggacggcggtccatgcggtacgtctcgtcgagccgaggagcgagctggcgagctgagctgctgctcgacgctccgaaggctgacgatcgctcctccctccgaccctcccttgctcgcctctgctgcttgcatcgacgtcaggccgccatctcctacatggcctggggcttcaaagcacgtcggtcccttcgctctgaggtctcgcctcggtaagagcagcgacgcaggcaagcggctgacgcgtgatcctgctcggctcgcctgctcctccttccgctcgctctcgctcgtagttaacacgctcggcgggccaatgggcgagatcacccagaaccagtacggcggccactgggccttcctgacgatcctcggactctgggcgacgatcttcacgctcggcgcgagcttgctcgccgacctgactggcctcggcgccttcaagtcgctcaagcgcgtcctgatgctcatcgcgctgccggttcatcctcgatctcgctcgaattactggtgttatagcaggcgctgatgcatcctcatcgttatcgtcgtcgtcaggtcgagaccgtcatctcctcagtctacgtgcggcccctctctggctcaaggctcacgcccctccccttgctgcgcctcttttgactgacccgagccgggctgcgtcaacttctcagtggggcattattctgacggtcccatcgcttatgatccctggcggacccgagggcgacagctcgactccgggcgtcgacccgacgccgccgtcgcagtactttatcccgctgccgatggacctcgccctccacctcacgccgtgccttgtcctgctcgtcgacttcttcttcttcgagaagccgtacgcatcgccggcgagcacttacggcgcttttacactcgcctcggcttgcggtgttgcctatggcctctgggccgagtggtgcgttctccttctcgggccaccctgtcgcatccgtctctatgctgactgcagtcttcctcgcccgccgcaggtgcgctcagcacaacgatggcgtctttgcctacccgttcctcacgattgcgcccctgcctgtccgtatggcgatttacggaggcgcgagtctcggcgcgctcggcttctttcgcgcgctcaacgcgctcaagcgcaaggaggtccgcgcgctcgagaggggggcgaggcactgaaagctggtgcttcttgcgcgagagcaggggcgatgatcttggactgacgatgagtgatggccttctgggtgccctgactgcgccgactctctgatgaacgtgagcgcagcaagcctcggccttgtcggcgctggccgtcactacgaactgggagggaggagagagaagggctgcgactgagcaaggcagcagcaggctccaagttcccagcagcagtcgcagcgacgtgcaggtcgaattgtttgttcgccccgctatatgagaagctcccgcccggtcaagctgcacgaggagcaagggcggcgggccgggcggacgagtgccgttccgcccgtcgaatcaaaaagagctgagctcgcgttgacttcctcctcgacacccaccctcctccttctcctttagcctaccatgacgagcccaatgcagcacaccgacctcaagtcggtccccgactcgctcgattcggacgagctccagatggtacatccgccgccgccggggcctccggctcgggccgacgaccgtcccctgcggcaggggcgacgcaaccagccatgatcgactcccttccggccaagaaaacactgtacgacctccaatcccaaacgggcgggaggaagggggacgaggacgggaccctttgcggtctcctgagttcgagacccgaaactctcccgggttgaaacggcagatcacgggtggctgccttgtctggaccccttcgttgaagcggggaagggcggggcgtctgagagtgcgcagctctggcctccgttctcaatctctctcccaaccttcccggtcccctccaagcaggtggactgtaagcggaggaggatgagagagaaaacgtgccggggctcgaaataccgtctaacctgagtcagattagcatctgcgtagggagcatcatcaagcagcgccgctccttcccggcggatcggactcggcccggccgacgggtgtccatcccccttcaccgcctctcctctagtctgtcgtctagccctgagggcgcccccgtctgaccttgctgtcccctcccttgtcgtttgaaagcaacatctcggctacaaacagtcgctcgctcgccgctggcactttgcagagtcgttcgccgcgtccttctgctcgctgaacttcctcggcggcactgtcggtcccagctctcgttccgaatgggctctcactcttacacgagccagcacatttccttcctgacgcctctctccttctcgcagcgctcgctcttcttcctcggcatcctcgccggcggcccactcgcaatgtggacgatggtcctcgtcacgatcgtctgcatgacgacaacctcggccgtcctcgccgaggtctgctcggccttgcccgttagcggctcgctctactgctgggccgcagcggctgccggcaagaagtacggccggctcgtcggcttcaccgtcggctggtgggtgcgtccttctctctgcttcttctccttccgctcccatcgctaacctcttgccttcctcctcctctcaggcgacctgcgcttggatgacttttgcctccggcaactgccagacgacggccaactatctgctctcgctgctctggatccacgacgtcgagtatcccggtggtctcgccgtcaccaacatcaagttccgcgtcctcgtctgggccgtctcggaggcgctcctaatcgtcgtcgtcgccctaaactacctcccgccaaaggcctactcgtgggtcttcaaagggtcgatgatcctgatggcgctcgactttgtcatctgcctcatctggctcccgatcggcgcggctcggtcgtacggcatccgctcggcctcagaggccctcctgacgacccacaacggtaccggtcacgtcgccggctggaactggcttctcgtcctcatctactcgaccggcaacagcatcggctgggatgcatccggccacgttgccgaggagacgattgacgcctcgcgggtcgcctcgcgcggaatgttctggtcctgcttggcctcgagcagcagcgccttttttgcgacgatcctctttctctttgtcacgccagacattgccacctgtgcgtcgtttctgctgatgctctgccttgcgcgcccaattgctgacctgcgcgcgagccttcctcccgactcgcaggggagaccttcaccgcgccgcagccttttgtccaggtctacgccctcgcctttggcaagtctggcgcgaccttcatgacaatcctcgccgtcgtcggtctcagtgtgtctaaactttcggaacgtgtgccctctcgccgagctctgactgccgccctcttcccccggccgccagtcctcaatacctcggtcgcgatcgtcgccgcgtcgcgtctcatctttgccgtcgctcgcgacggcgtcttgcccggctcgtcgtggatcgggcaggtgaccagtgacggccggcccaagaagtgcgggccctttggccgcggccgctgtcccttggctcgccctgactgaccatcctacatcgctcgtttagcgccgttaccgtctttgctgtctttggatcgctcctgttgtgctcgattcttccgtccaacgtcgccttcacttcgctcgtctcagccggagccggtttgtcgcccttcgtctggcgggatccaggctgcgactgactagctcacctttgactccccagtgccgaccatctcggcctacgcgctcatccccatctgccggatattcatttctcgcagccggttcagacatacgaaattctcgctcggccagctcgccctgccggcctacattatcgccgccgccttcaaccttctcctctttgccgtcctcatctcgccctttggctggcccgtcagcgcggcgacgttcaacgtgcatccttgcgctccttccctggacgctcgaagccagctgaccggctcccgcactacagtacgcgcccgtcatttgggtcgccgcatgcctcgccggctgggcctcgtggttcctcatcccctccgagaactggctccggcaggacctcctcgtccacatggacgacggcgcgaacggcgacgagaaggcgctcgactagacgcgtgtcgatctctcgattgtcgctcgcggcggctccttcaactgaagctcgccaggctcgccttttacagcgacctccccctcctcgcaacgtacattccgcaccgctatcgcattgccgattcggattcccctcccactctctcctcgcttgcatgctcatgaagcgatctcaaaccttgcagcctggttcgcctgaagcatcaaaggcgagtgacatggcggcgctccctcccacccgtcagacaaacaagtgaagctccatgggtccatttctttacttctgctcggcgatgaaggcttcgaggcagtcaacgatgacctggtggtcgtctgagcagcggcgagagaagagtcagccggcagactgcaacagtgctgcgaaaggggcgggacgcaccctcctgtttgagacccgagacgacgacaacgccgacgagcggctcgacgccgttgacccgcagggggaagcctccgccgtgagtcgcgtactgcgaggcagcaccgggaccgaggtcagctcgttgaccaaggccgtgatcttacagcaggaaacgggacgcacgacagcctcgtcgagcccgtactttgccggcatgccattcgcatatttgttgcgcatgctcgcggtcgagatcccccagcggacgacgctcgcccgcttgcgctcgacccagctcttgttgtcgagcgtgctgccctcgcccgtcgtcgcgaagaacaaaagctgctcggttgagccggccgtgatctggacgacgacaggtgctgaggccccgtgtgtcttgatgatgtgcgagcggagcctaaggccgaggtcgaaggccgtctgggaggtgaaggacgagaggacgagctcgcgctcctgacgggcagtctcggcggcgtcctacgaggggagggggaaggagggcgaggtcagccgtcggctcaggtagtcctgctacttgacaacacgcacaaaggacatggctggcggaaaggggttgggagtaatcagatggagctcatcgacaaagaggatgatcgactcgccggcctcctgcgccttctcgatgtcgttcatcacgcccttaacgcgctcctctgcgagaggtgggagagagcggacgagtgagcactcaaatcagacgacagtaaaccggcagaaagagtgagagagactaaccgtattctcccttgtacttggctcccgccatgagcgcgccgaggtcgagcgcgagcaccttgccgatcagcgaggccggcacgtcgcgcgaaacgatgcgctgagcgaggccctcgacgacggccgtcttgccgacgccgggctcgccgatcaggaccgggttcgactttgtccggcgggacatgatgcggatgcagcgccggatctcatcgtcgcggccgatgaccgggtcgagcttgccctcctcggcgagtgccgtcagatcgctgcagtacttttggaggaactcgccctcgcccgagaggccgccggcccggtcggcgtccttgctgtccatgcgcttgccggctcggagtgcctggagggcgtcgagcagcggcttgaccggcagcttgagcgagttcagaatcggctggatcgtcgagtgctggaggagaggcggtaggaggtggattggcgagaggtgcgtgtcgttctgcgaggatagaggggcggcggcggtcaatcctcgcgctcagctcaaggccgcagcaacccggcgaaacgcacctgagacttcatcagctcctgaccgtcgcgcaggagctttgagagcggcccgatcgagacgtcttccggcggcggatcctgcgccggaagcttgacgatcgccttctggagggcccgctggaaggcgaccgggtcgccgccgacctggttgatgacctgccataggagcgactgttggccggccggcgagccgtcggtcgaaccgttcgcattcgggctctggttcgggtccgagaggagcgtgagggcgagatggactgggtagacctgcgacgagttgtacgacttggcgacctgcggagtcgaaggggagagagagcgcgcgagcgagccgggggtcagctgagaagcccggcgaaggaggctgaagtcaagaaacggacctggatggccgacgagattgcggcttgtgagagggtggtgaactgaaagtctgccatgctgtctggagtgggcttggtgggtatacttctgatggtgtcggggcgtgcgatgacctcgacttaagaaggacgatggaggttcggctcgaccctccgcgcgcgtcacgccgagaaggcgccaggttcgaccggaaccgcctagaatcgtctcgatgccaccctcgctaaccctaactctcgcccggagcaaggcagggaccattgagagcaaagtacaagcgcagtgcagcccggtaaaagagagagagaaccaagagaaggaggtggaagagatgcaaagggaaggtgcggcagactcgggcgagtgcggcaggtgcaggcgggcgcgaggccgtccctcgacaagccgcaacagactaggacgaacgggagacagcaagacggccttagtcggcgtacctgcaaccaatgcaatgaaggaggtcagcatcagacccggtcacggcggccgcagcgaacgttgcgacgcacaagacgagcttgtcggtcctgctcatccagtcgagcaggtcgcggtcgtcctcgatcccccggttggcgcccttgccgctgccgacgctgtcgcggaagctgagcacgcgccggccgccgccgagccggtcctggaccttctggctgagctggtcaaacgtcacgttgggcgggacccggatggccatgacgtcgtcggtcgtcgagtcgtaaatcttgatcttcttgtaggccgccgtcgagcctccgccctgctggccagagccggagccggtcgagccggccgtcaaaggaccaggcgtcattggcgagaggcccgagccgaggacgctgctgccgccgccgccggcgttcgatccccaagacgaggagacggccgacggcagcccgcccgaggcatagtcgttcgacggcggccgctgcgacgcgacgagcccgttcgacgccgagtagggcgtccgccgaaggttggtgtcgatcggcggcagtggcgaggccgtcctaccgggggcgccaccgccttgactgctccctgccgactgcgagagcgtcaggctcggcccccgctggagctgctgctgctggctcgccgtccgtgagtgatgccgctgatgcgagccgccgctctcgcggtggccgttgtggccgtcatcgtcaccgtcgccgaggccgaggttgtccatgctgtcttcaaggtcgacaaggggctcctggctgcgctcggcctcgagctcacgctcggccacctcgcgcgggacagggctgttgccgtccgacttgccggcgtgaaagaaggaccggacgagcgggctcgagagcacatagtcggcacgaatccggtgaagggcgatgaggaagcggatgtagctgtcgagctcggagcggcggtcgtgtgtgatcgcgtcgttaacctcgtcgagcgggcccggcatgtagggcaggatccgtcgcggcggcggcgccgacgggttggccgggtcgggtcgacccgcctcggccgggaacgtgtcgagcaggtcaatttggaagcggtagaagtggtcgtacgtccggaagaggatgagccgcgaggccttctcggccgggtcgtccggcagaaagacggcgtggatcctgaagaagtactcttcccggccgtcgaccttctcctgatgaaacgagacgacgcaggccgaagagaaggtgccgggcggcagcatgccttcttcaaggtcagactggatcgagcgtgacagcgatggctgctggccgtggtgatgcgaggaggagggaccacgctgaagctgctgttgctgcgtcgtcgacgcataatgctgagctgacggctggcgctggtgctggctgtggtactgctcgcttgacccgcgcgactgctgcgactgccgctgctgctgctgcggttgctgggccgagggatgcgcggcatacggactgttggcgacgccctgagaaggtgcgccatcatcgagccgcccgagcgggatcgtcgagctcgcgtacgattcagtcttctcccgccactccttgacgtcgggcagggccgactcgcgcagtagtcgcggtacgtccgcgtgcggcagaccggtcgccgggtcgagaatctcgacgaacgagaccggaatcaggcccggcttcgacacggtcacgatttttttggcgacgaacctacgagaggagcgtgtcggcagagtcagcacgagaaaggtttgtgcgtgaggatgaggcgccgcaccaatcctcggtcgagatggcctggatcagcaccggctcgtccttgagcgcactcagctcgtcgtcgcgctcggcgacaaagtcgtacatcatctttccgtagagcctgcgagggagggaggttcgattgcagcagtcagcgagctagccctgttgctcccggcgcgcgctcgtcggcacgcactccttccgcggcgcagcctttgtgctcgatgaacgtgacgggcccgagtgctgcgagccggttgggctttgaacactggatggcgatgacagaggatcagcaagcgcgctcagagacggtcggaggggccggccaactgagacgcacctactccggctctcggagatggaacccttgctgccgtgggcgcccgagcggccaaactcctcgaacttggccttcgagacgagacctcgggcgttcgacatcgtatctacggagtgacaggaccagcgtgtcagcgagccggcgttgcatccatgcctgtgtcgtctctccgaacgaaggcgactcactcaacgcctcgtagtagcccggcccgccgtgcggatcatcccgctcgccgacgacataaaagaagtcgcccttgttgaacggcagctcctgcgggctcgtgctgacatggctctcctttgcccggatgacctttttgggcggctggatcgaggccgtcggcttcgagagcgtcgtcgggaggccggctccgtgcggggcggccgcgccgtccttggacttctcgccgagcgacctgcggaagctcttcattgcggcggaaggtaagcgagaggggggaggtggctcggctggatggcctcgtgagagagtgtagaagagaggtggcgctggaggaggaaggggtctgagaagtcggtcgagctgcgagagccgggagcgaggtcgatgttccggagggccggccggtcggcgatgcgtgtggctctggtcctaaagcgacgacttggatcgacgagcgggagccgagctatactgtgcgtgcagacagacgcctagcaggagagaaggtaggcggcgatggcagacgagcgatgcggtcggtcgggaaggagcaagcgtcggcctcgcagctgtcgacctgacacgagcccgcgcgcgaggaagcgagacaaacggcctggcgcgtccgagtgcgtgcggctgggcgtcacgcgcgctccttttgtcgtctttgttgcgaaagatgagagatgcatagggatgaggcagacgaatgtacaagtgcgagaaggggcgattacaacggaacgggtcgggcgagagggtcgtcagaagagcagggcgagcaggccgccgccagcctcctcctcgtcgcggtcgtcgcgctcgccaccgagccgacgctgggcctcttcctcttcagcccaatcgacgcggtcctcgcgttcgagcacccgctgccagtagtcacgctcggccgcaccaggcaggccgtccggcacgagccgccgcggctggtctgcgacatccgagtcgaccgagtcgggctcggccggcgcacgcgcggtgagagcctccgagagggcccgcatcgccgtctcgcgctggtggatgagccgccgcctgtaggcctcgagcggcgggacgatcgagcagatgaggaggaacggcggtagcagcagcggcttgagaatcgagggccgcgggaggccggccgcgcgttgccgagccgaagtgggcggcggcgagagacgaagccggtcggtctcggtctggaggccggtggcgaggagggcatggaagggcgtcgccgccgatggcaggcggaatgttggcagagggggcagcggccggccagggtcggtcgagccggcctcaggcccggctgggtttgcggtggcggcgcgcactactggcggcgttggctggagtcggcggtagcccttccaggcctcccagagccagactgcggtgaggccggcagcccaaagacagctgtcgaaccagtcgtcgtcctgagtgaagatccaccagactgggatgaagggcaaggtcagcaggcgcgttcaggagaggcacgcttgagtaggccaaccggactcaccaatgacgtatttgatgaggttcatggcaaggagggtcatgacggccgccacctggttacggttgacagccggcgagaccgctggcgtcggcgtcggcggaggcatggcagccgtggtggttggcgcaggaaagggtcctggcgggtgggcgcgcaagagagcctcgaggagggacagtcgggtcgtaaacatcaggtagcgctggatcgtgtactgctcgtcagtcgacagggtggacagtggcgggatagcgagcgcaaacggctggccactgcggaggcacggcagagggtggatcagccctccgcaaatgcacagaccagagccctggcagcacttactcgacgctgacttcaagctcctggccctccggccggacccactcgtcgagccggcgcctaaggtccatcgcgtcgccgagcgcgctgtcgatgccgacggcgtccatcgtctgccggacgagcgccttagcgtgcgcgaggctaacgagcggcgccggctgctggccctcccagctgagccgggatgcggcctgcatctcgcgcagggcgtcctcggcgaggtacgagtagagtgcgagggcgtcggccagggcgtggtagtatgacaagggctgcgttgctacaggcggtgaggccgaggtcaaggtgctagcggggcgcggtgtcggagctgcggccgacgacgcgggcggcgatgccggggaggcggccgaggcgccggccgggagctggaccggtcgaccgtcaagctcgagcagagttgaggacgaggcagcagacgggctgctcgctgcagctggcgtagggtctggcactggctgctgcttgccaggccggaggacgaggtggataaggtgcgggccgtgttgctctgcccggacggcgtcgccgccgaggacgtcgagcacggtctcgccgtcgcgcaggagccggccgccccgaacgagccggatgtcgcccacggcaggcgatgcagggtgcaggctcgagatctgagagcggatgtgcgtgatcgagtcggtcgggtcggccgtgatctgtagcggcgaccggccggcagacgagtcgagcagctgcaagacgaccatcaagggcgcggcgcggcgagagcgaaaccggtggaggctgaagcctgagcgatggggagctcctagagatgagggatgtgtgcaggtagagggtccagtgtcggaggccgatcttgatggactgcttgctctgagtgtgctgagaggtaagcttgtggaagaggtcgtgagctggcagaagaggaggttggtcgcttcggtcgtgcggccgcgcccgcgtcacccacctcctcgcgcagcactcagtccctctctggcccaaaactcagcgagggctcgtcgaaggcaaaaagagggtggcgcatgggcatcacatgggagggcaggatatgcttggggacgtgtgctaagcgtagacgagagtgatcgagatggggtagcgcgaagattgccagaaaggcgtgaggtggatcgagagcgagtatagggatggaggcgttggtcgtaacgaatgctgcgacgatgggcgactaacgaatcggcgtcgagaggcgagctgcaagaaagtatcagtcgtatcggaggatggtcagccagcggtcgctttgatgaaaaattccatcactgaccctggccgtgcactcgtccgctgtgttgccgcttggccgggggcgtcggtcggttggccggagagtcgcacttggcgctgatgccggcattctccttcccaccaacagagaacggcgacggaggcgccggcagcatcttgccgggcagcgaggacgaccgagacggccggccgaggaggagtttggccggcttgagcttgttgacgcgcagcggcggggtcggcgagtcgaacgtcgaagccgtcgaagacgccgatgggctggcgaggtgctggaccgtgacgacgttgccgaccgagatattgcagaaggtcgcccgggcaaactcgacccggccgggcgagggcgagaggcccggcgagcgcgtaaacttgccgagacggtcccttgccgagagaggcgtcgcaggcgtcaacggtgacgagtcgaccgtcgccgtcgtccggctgccctcgcggtcgctctcgctgtcgctgctggcgagggtgaagcagctctcttcggtcacgtcgtcgtcggacgcccagtcgagaaggaccggatcgagcaggtcgcggccctcgtcctcgccgagcgcgagcagcgacgccagcaggggcgtgaggccggcccgtagatcttcgggctcgatgggcgtcgcatccctcggcgtcgacatggcgaatgatccgatatatctcctgctggtgggcagcggcgaggcagacggctcgtccgaggtctgactggccagagcagggtcggtcgctgaggcttggatctcggtcgtcgaccggagcagctcttcctgggcggcggcaaagcgcgagccggagagagcgatgtgagccggcggagtgaccgagatccacggcgtcagcgcaggagcggtctggaggtgccagcgctcggcaaacaaggctgcaaggggccgaacgcaagagatcggtgggtgattaagggctgaaaggcatgcaagtagtgcgcacgtacctgcagaggaagtctctagactgagagcatggtccatggctgcttgaacgcggcaccggggcgttgaaacgatgtcatgcaaggcgcaggcgagctcgccctcaaacgagcctacctgctcaagattgacgtcgttgagccagccgttgtccgcgagcagctcgagctccgactgctggccgaccgagtaggtcggagatgggagggcggcgaaagggtcctcgtcgacgccgaggccggaagaggagactggcgaccggggcgtgtgcgaaagccggcggccgccagccgggaccgagaggtggccgccctcgctcgagctccgtcggtgcaggccgaacgagccaaaggagctcgtcgagaaggttgagccgactggcgactcggttgaagggtcggaccggccccaggaggagaacgacggtttgcggaagagcgagagcagcggtgggcgggggcgacgccggggcgcgtgagcggaggagctgaaggcgccaaccgcttcaggccggtgccgatctgcgtagccgagggaagtgctcggccgaggagggcttgtaacgtctggttggaggttgagggtcgagaaggagcgtgagaggcggtaggcggcgggcatggcggccaaggagcgggccgttgctgaaccggatgggaattcgagcctgatgactgagcaggaagaagcgagcgtgacgatgaggccagtgagaggggcgactgacagccgagggcgagggcgaggagggacggggagggggcgagggagacgaggtcgactgagctgggtcgggaggagggatggaagctcgggactgtgagctgccgagctctccgccgcgcaagtcccctgatacgacgcgtccagccccgtcgcgtgctgtgttgaccgacagggggcttgttgagcttcggagggtgtagtgcctgccagtagacgcgtcaggttaacaggcacggcgagcgacaggagcagccccgcaagcagcgccgtgactgatcgttcgtgcgaagctgcttgtgaaagaaggcgtcagcctgctcgagtcgtcagttagtatcgggctcctgagcagaagagtcgcgggtctggggtcgagagggatcgagctgaggcaccgtcggcgcagccgccgaccaccgccgcccggccatctgaaccagggaaagccattcctcatcaccgcttctcttctagaaagccgtaatgccggcggatacgccgaagtgtctcctcctttgactcgatcttgactggtcggtccgtctcgagccgagccgtgcgccgggccgtagccggacaaggcaagacaacggtcgcgagagagccgacaaacgtcagagagaagaggagcgacagcgtcgaccggtgtgagagagagaagagcgtatgcagcagcggtgccatcgttcttgatcgatgggttgatgctgtaaaggcggcggggtcgacaggtcagatcagcctcaagctgaggcacgcccaccgccgaacgaggcacttacctccccccgcaagggaccaatcgtcgcccggcaacgatagagtcggacgattactagcgccagcccagctttgtccaaacgttctggtcttgcaaagaccgtcgcgagaagggagtgaagtcgtgtgtggcgggtggcggtcgggaggcagcgcagacagacggccggagccgactcgagcttggacctcctgggtgctgcaccttgacgtcgaccccgaactcttgtctcagtctctattcaaagcagtcgcagccatcgcacgacgtagtcctagcgcatcctctgcgcccaccatggcaggcccgcaacctccgctgccaccggtcccgaaccgcgacctcctcctccggctctcgtacacgcagcaggcggcgacgtacctccacctcgcccagtacgcccacgacgccgaggcctctggcacaagcagctctgcaggcaccgaggccgccgtcaaaggcaagcagcgtacccgacctgaggcagacgagagcagctcgggcggcaagcgtcgtcgtggccgcaagcagcacggcgcgcccggttcgctcgcccgcctcgcccgttcgctggcgagcgacatccctcgcgtcacgtcgcacaacaagatccgactgtacgtctccttctgagcttgtgctggccgtagctgtcgcgctgtctgaccgacgagcttggcctttgacctgtaacagtgaccccggcttcaagcgggcgctttgtaagacgtgtcacacggtcctcctgcccggcctgaccgcccaggttgttaaccggcgtacgtcgagctcgcgatcaccactggcgagagctttttgagtgctgacctgctggatcacgcttgtcctgcatctcagcgtcccgcacgcacggccacgtcgtcgcgacgacctgtgcgcactgcgcgacggtcaagacgctgccccgaccgccgctctacccgctgcccatcccggtcgagacgctgctcgcgcccgttccaggcaagtcgaaaggcaagcgcaaggcgcagcctagcccggcagacgtcgtcgagccgcaggcgaccatgccggctgccggcccggcctcgcccgcaagcctcacgcatcctttctcgcctgcgaccccggccttagcattcaccttctctcccacctactcccctcccttcctgacggacccggtttactctcctccggaaccaaattacttgccagcggctccaagtgttctcggtcagagcactacgcctgcctggtcgccgccagccgccggttcgccggcctttccgtcggcctactcgccggtctattcgacagtgaccccactaatctcgctcgagactccagtcatgtcgcccttgacgccggcccgcttttcgtccctcggcgctgtcttgccggccacctcgccggacgtcagtgcaccagccccttcagcgctcgccctgcccctccctctgccggccgcccagtcgccgacggcggcaccagagctgcggtacaacaagcgcgagcgccagcagatgcgtctactcgcccgtcggtcgaccgtcacagaggaggaccgcgccaagggcgagcgcttcaagaatggcaagcgccggccgggcggcgcgccggctggctacggcaccggcggcgggctcgacatcctgagcgagcgcgagggcgtcggtcactggcggcaggagggtcagcaggctggctggaccgcgatctgatgggtgtagacgacaagtggctgtgggacccgctgaaggagacggccttcgctgctgaccgtcctgccaaacgaccgacccatctcggtcagcttcgccgcgctcgcacttctttcttgaccatcgtctggtcagctaggagcgtccgtcgcccgcgttgctttgtccgccaacccgttttcgcgcggccgagcttgcgcccgagccttctgcccgcggagcccgcggagagtttcggccgccaaactggccgcgcctgccgaacctcagcaccatggcctgactcatcgcgcgggctcgctgtctccgtttggcggtgcgcgtcccggtcgcatggctgtggacgagctcggccatcggccttggcacgccgttcgctgcctcgctcacagagtcgtccaacgtaaggagggccggaagcagactggtgagtccctacataacgcgctgctggcccgggctgacggtctcgctctcaacattcacccatcccatctcaacactcctccttggcctggccccaactttaccaacagcctctctactcaccatgcccgcccttaagaacgttgtcatccttggtgtgcgtatctcttggcctcgacgcgcgctcgacgcccgtcagcctgctgcgcctcccagctgacgacctcgacctgttcgtccgctcgaccaggcctccggcaacatcggcaagccaatcgtcgacgccctcctcgccgacggctccttcagtgtgacggccatctcgcgcaaggagtcaaaggcgaccttcccggacggcgtcaaggtcgtcaggtctgacttctcgccgagcgagctcgccgacgccttcagctcgcaggacgtcgtcatctcggccgtctcgacgatgggcgagaaccaagagatcaagttcattgacgctgctctcaaggctggcgtcaagcgttacatctcgaacgacgtcagtcccgtccatctcctgtgcagcaagcggtctgaagcgagactgacgagctcatgactgtgctcagttcggcgccgacgtcgagaaccccaacatggtcccggccgtgcccttcatgcagggcaaggtcgacactgtccagtacctccgcagcaaggagagcgagagcctgtcctggacggccgtcgtcaccggcggcttcactgagtttgtgcgtcggctattcccttgtctgagctgcgcgagcatcaagatgctgacgaattggtctgccacccccgcttccgcagggctttgagaccggtctcctgggcttcaacctgaaggagcacaaggcgacgatctacgactcgggcgacgtcaagacgacgacgacgacctacgtacgtctcgcgcgcctggtagccgttcgcacgacaagccgctgatcggccttccgtcccacagtctaacgtcggccgctcaatcgtcggcatcctccgcaagcccgatgagacggccaaccgctacgtccacattgcctcgtttgtctacacgcagaacgagctcctggcggtgctcgaaaaggtctctggcaagaagtttgccgtcgagcactcgacggccaagcagatgcagtccgagggcctcgaggcactcaagacgttctccatgcccgacgtcctcaagctgctcgtctacggcttgtatggcgagggcaacggcggcgactatgcgctcaccaagaacgactcggagctgctcggcctcgagaaggaggacctcgagacggtcgtccggcgcatttacgaggcccagaagcagtagcttcgggaagtttggctgcctttccttgacccgcctctcgcccttgtagaccacctgccccttattgctgctcgctgcttgtcctgtatcgcatcgcatctgcactatctttcggtaaccggctcttcggaaaggccgagctggtgggaagcgcagggctctcatcaaaacacatcgatcatcgcgtctcagacctcctgaccgaggcgctcacctccgagcagccttccggtgctacttcctcccccagcagtgccgaccagcggctctcttccacggctcttggcgaccctgagcgcaccctcgaagcggcccatgatgtgccggaggccgtccatctccgtctggacgtcgatcatgtcttcctcgtcggaaccgccagcaaaccagccgacgacgccggctttgaagtagcctgtttgcgcggtccagagtctgcgcgtcagcctcgagcgctgcaaccggtctcgttgacgaggcgctcgcacgcaccaacgttgtcacggtagccgacgagatcctcccggacgtcctccatcccgcgccggatgtcacgcagtctgttgaccgtctcgcccgcgagcttcatgtcgcgcttaacgatgtcgcgccggaagaccgaggcgccgccgaacgcctcatctccttcgtcccggccgcggcgaccgacggccttctttgcctggctgagaagtggcgcccagagtggctcgtctgcgagctgctcttcgagtgcaaggcgttcgacgagaaactcctcctgcagcttgccgccgagcttcgacgctcgcgaggcaagcgggattgtcccttcgaccgactcctgaagactggagagcgaggtcgacagctggccgatgagctgcgtcagctggcgctggagggcgagtcgggcttgcttagtcgggacgatggcgggcgctgcggcggagccgctgccgccagacgagccggctagaggagggggagagagctgctggagcgacgtctcgaggacggcaaacgaatgtaggatccaagtgaacgagttgattccctgcgagttgatgccgctaagtgacaggtgaaaggaagtggtcaagctcctacgatcgtccacgcgactgctgacggccagactcacatcagtctgtccttcatgtcgcgggtcaggtcgccgagcgcgacgagctcgctcgcaaggatgtccttgccctcgagcttgcttccacgcttgacgctcatcgccagctcccagatcctatgaccccgaagcgagtcatcagcgtcctgcgcctccagtcgtacgacgacgaccgactcactcggtctggtgtaagccgccgccagcgacgctcagatcgctcattccgatgacgctctcaaagatgtcgtttgcccgcgtcgcctcgacccggagcgagtgcgcgagcttgccgacgttgagcgccttgccgtcggcttcagagccggtgtcgagcgggcagtagaggccgagaaagcacgtgagcggcgtaatggtcgacagcggcactaaggacagaagcgatgagactggccggacgacaaaggatcatcagctcaaagaccagtaaaggtttgagcggtgaacgtcggatgaaggccaactcactcgacgtcaggctggtcaggccgttctgaagcatgcgccagccgagcagcgcagcgccgagcgcgatgccgaagacgagcagcggcgcccaggcgaacccgagaatcaaaatgatcggcttgaggaggagcatcctaaagaggctgaagagggtcgagagcgacgagaggatggccaagagggtcgtgctgatggcacggtcgagtctgtcgaatagcgacgagggcgcgggcgggcgagaggcggccgtgccaacggtggccttcttcggcgtgcttggtcgtgccacacggccggccgggaaagctgctgaagtcgaggcaccgactccggctccagaggatgagcttagcgtgccgaaagaatggacagaggctatctgtccgccgagctcatcagcccggggctcaagtgggcgaggcggcggcggcgatgtcggagcgaacggggagggcttgaccgccgagctcgaggctgctagccggctaggcatcggaggtgccgaagactgcttgctcttcttcttctggcccatggtcgaggtggatggacgtcggagaggcgcacgggcgggtgagtgttggcgggtcgcttcgactgcgcgcgcctggcctgccttgatccgcgtcatcaaaggcggcgcccgcctgcaatctgtcccggaaaggacctcgcaggacgaaactgacactcgcaactggctgacgcgcgttggagatcgttaaaggtcatgctcatgtaggggagcagcggggaactaaaggtaggaagacagtgccaagaagagcgaacgggggaaggaaggggagacacgaggagccgccaactttttacttcttgccctcgaacatcttcttgatggcctcggagctgaacgacttggggcgctcgaggggcatgccaagggcgcggtcccagatgagctgcgaggcgacaccaaaggcgcgcgagacaccgaagaggacggtgtagaacgactgctccttgaagccgtagtgggtaaggaggacacccgagtgggcgtcgacgttgggccagctgagagagacgaagggagagggtcagcgacgaggcacaaaggcgcgtagggattaggggcgagacgcacgggttcttggccttgccggccttgaggagaatgtcggggacgagcgtgtagagctggccgacgagcttgaagagcttgtcgtcgggcaggtgcttgagcgcaaactcgcgctgggcctggtagcgggggtccgtcttgcgaaggacggcgtggccgtagccagggatgacctggccgccgttgagcgtcttccagacgtactccgagaccttctcgtccgaggcgtcgacaccaatctcggcctgcatcttggcaacccagttgaggacctcctggttggcgaggccgtggagcgggccggcgagaccgttgagggcggcggccatcgagaggaaggggtccgagagggccgagccgacgaggtggccggtgtgggccgagacgttgccgccctcgtggtccgagtgaatcgtaatgtagagccgcatgagctcgacaaacttctcgtcgccgccaaagccgagctggttgcagaggttctgcgaatagtcggccttgaggtcgatcgcaggcgggttcgagccaccgaacgtgttgcggtagatgcggccggcgatcgcgggcatcttggcaatcaggtccatcgagtcgtcgaacgtcgtctgccagtactcgcgcttgtggacgccctcctggtaagcctgggcgaaggccgagtcgtggttgagctgaggcagggagcaattatcagtgtcagacccgataaaagcgaacgggcaaaccgagggatcgacgcacagcggtgacggcgagcgagaactgcgacatcgggtggagggtcgacgggcaagcgtcgatgaggtcctcgacgaacttggggatcgtcgcccgggcggcccagtcggccgagagggtggcgcactgttcggcggtcgggacctcgccggtgaggagaagccagaagagggcctcaggcaggggctcgttgcctccgggagccttggggaggagctcctggcactcggggatggtctttccgcggaaacggatgccctcgtctgagagacgcaacgggagctcgtcagttgactacgtctgaagacagcagctcgctcgaggcgactcaccggcgtcgaggacggagccctcccagatcatgcccttgatgccacgcatgccactgtgagagaagggaaaaagaaagcatcgtaagcgcggaaaacgtcgggccgtcagccggttggacgactttcgaaatcggagcgagagtaaagaaggagcacgcacccgtaagcctggtcgacggtgtactcgccgaacgacttgttgccgtgctccttgcggatagccttaacctgcaaggttgaaagcaggagtgcgtcagcgactggctgccttggctcgcgggcgcccgtgcgtcggcgaaaagagagcgagggcaaaagacggacattctcaatctccttggggatgagctcggcgagggtctccttgagcgtcttggccttggcggcgtaggcgcgcgagaggcggggggcgttggcctgaaggagaagcagcagcagaagcaacaacggaaaagaagggcgggtcgggggcagcaaaagagaggcggtcagcccatcggaactgccatcggacggccaaggagcgcaatgcgatgcgagtatgcgacatgcatgcgcctgtctgcgagcgatggacgaacctgggcccggaggagggtgcgaaggggagcgacagacatcttttttcgaaggagagagggtgatgggtagaggacagacaggccagcagcaatggcggcgcaagggaaaagccgacccgggcaaggcgtgtgccgccgcggccgcgcgcgtgcgggtcatcccggcggcgggccctgttgcaaaccgacggccgcatcatcaaacgatcaagcagactcgactcggatcgcaggcaggcctcagagtaagagcactaaagcaaggatctcggctctgctcagcgtcctcaaagctgctggcctttcttgaggctcgactcctggcagcctgtatgagctgctgcgcccgtctcctccgaccggggcgggcaggtgccgcacctttggcaaagctgttgccgacgcactttcctttcgcacgcgcctgctctccgcctcgccggccccgacgtgcggggctcgataagacgctcggggctctaccgggggtgcccacatcagcatgagcactcaacaacacgcagcgatgaggtctcagccctcgaggtcgctggtgcagccagcgagcccgtcccgagcctcggcgataatcgcagacggcagaggcctcatccacgagcgcagtgcgcgagccctgctgtacgcccccgcatcggcaccttcggagcaaagttcatgcgtcgtccctttcgggtcacttggactcagtacagatcggcagcggcgacgctcctgcggcctcgccccctgctggcggtgtggtcgatagcgaacgcaggaggtcccagagccgaacgggcgaggtaacctgctccgagatggcaaagtcgtactctgttcggacgagctcgtggaacggccggtagacgtcaatgatgctcgactgcgttaaaccagaaaagggcgtgaggtcagccgcgtgctggaagagagagtgggccaaaggggacgaacctgcattggcgggatgagcacgtcgaccgccttgtcgtcttcgagataggtccggagtttgccgacccagctgccaatctcgactcgcatactctcgcgcaccgcctcgtggacggcgagcaccttgtctggcgtcgcccactcctgcgccgtcaagtcgctgctgtcggcggcggcgccaaggaaggccgatgctcggctgaggaaggcccggagcggagtggtcgaagcgaccgtcgcttgcgtgatgaggtcctcgcaagcgtccttgagcgagcggtcgagctcgcgcttgatgtcgtctgcggcctggtcgaccgaccggagcgtttttgagcctgacgctgggccgtagccgaacgtgaggctcgagggcaggaagcttagcgcggacgagagcatggccgagaaggcatctgcgacgggtcggaaggagaaagaggatcagtggactgcggttcgctaggattgcacagcgaaggcaagacggaccggtcacgccaagcatctcgccgcccatgtcgcgcttgaccatctcgacgctgctcagcatctccttaaggatgagcaggtgccggacgagaaagaggccgccgtcgacccggccgacctttgagttgagcagctcggtcgccgtcaggagcgactgccggcagagcgagacggcctcctgtgcgaggtcctcgaagatgctcggctggtggttgcgaggagggaaatgatcagcacgtagcaagagatgcgctcaggacagctgcagccggacgcactgcgatgaacgaatgcagctcgctcagtagccacagcgtctttcgaaccgatggataccacgtctcctggatttcaagcgccggcaggcggaagagggcgccatcgtcgtcgtcgtctgtgccgccgatgctggcaaggtcggtgaccgactgggccggggaaggcttcgctgtagccggcttccggaagcccttctcggcagctggtgtcaaaggaaggcgtcagtcagccgctgttatcaggctgcggtggattttctcgataaagccgcacctcggatgatgacgtccggatagttgaggtccttctcggtcggcatgaagcggccaacctcattgacgatgagcgcctggccgcggaagacgagccgggtttgggcgtcttgaaggacaggctttaaaagcaaggccatgtgggccttgcgcgcggtccggtccagcccttcgagccgaagcatgcggtcctcgcgtttcgtgccggccggagatgacggcccgtcggtctcgctcacgaagcgcgcgcgcggcttggaaaagggcgagacgtctgacgaaggcgagtcgtgggcctcctgcagcatggccggtgacagaccgcgtgagctcagaccagcctcggagccggtctcgtcatcgtcctcgccgtcagagtcgatcgtgtcgaggaccatcagcgcctggacgacggtgcagacctggcagagggtcgtgatcgactgctcgtgaaggatccgcggccggaggtagtcgtacaggtagtcgcatagcgactcgaggaagggtctgttcgagagtgcgacggttagcgctctgcctgaggcgcctcaaagcttacccagacgcacagcagcgcgtcctcgccgcccgtcgcgaagaattgccggaagagctgaaactcgtccgagcagagctgcttgaggtagccgcagccggcccgggtctgttcacgcgcgacagaacgtcagctcaatcgaagactagcgatggaggtatgggggacgtacaaggtcgaccaggtcgcctcggttcgggtccaagcgggcgatctcagccccaacgaccgcgctcaggacgcctacccggaacgacacccaagccgccgcgcattcgtcgacgagcaggccaacctgaccagcctcgccgtctgtaggctgagccccacgagtcgcagagcgcgatgatggcgaccggagctggagctcgcgcaggagcggcgcgaccgaggcgacgagcgcgagcggctttgaatagagcagcgcgcggagtgcgggttccgaaaggttctgtgacggttatcgctcggtcagctgtgaacggtgctggcgtagaacgattcggcgcacctgctccgccagacgcttgccgacgtcggccccgagccccttgacggttgcgacaaagtggatcttgatcatcgtcatgctccggctcagacactgctgatagcgcaggatgtaaagctccgagtctttgtagtcgcgctgcgagtaaaagagaaggaggctatcagcgaacggactcgctgcgcagcgcgacctctcggagggatgcacatgtgactgcaagtacgcaaggcactcgtcaacccgctcgatcatcgggataaactctggaccagtgacgtgcgatgctgctccgggtgcattgagcgcgcgtgtcgccggttcgagcgaggcaaagtacgagaggcggttcgagagtgtctcagagacggtgatcaggcgaccctgcgggcgagagcggaatcggcgggtcagcttctcgctcaggcccaaagcagatcacggcggccgacgtacctgctcatccagcagctcctcgcacgctgcctgcaggctcttgctgcgctcctcgacgaagcggaagctctcgcccatctcgccgcagacgcgctcggccgcatcgcactcgtcgacgagcgcgtcgcacgccgagcggtagccgacaatctcagcgaggtagtcgcggtagagggcgtcctgctcgtgctcgagcgaggctgtcaggcccgagaaccagtcgtagaactgctggggcgtcgcgatcgacgggcttgcgttgggcgcggcaacagacgaaagcgagttgacggacgacgcgagctggtggtggtgatgatggctcccactggcgtactggccgcccgcatgaaggtggttggagggcgtcgtcggccgtgagggcggccgtgaccctggcgagaggacgttgtgcaggagcgaggaagagacgttccgcctgctcccgaggggggtgcttggacgagagggcggtacgagccccggagcaggcggggccgagggtgtgtactggccggcgcagacccatcagcatccacgcatagataccggcaagccagctagagcaccaggaccgaccttctgaggcaagggccgctgatctcttgtccggcggacgagcgagatgctcgcgagctggtcctcggcgagcggcgtacgggactcccagtcgtcgagcgtgatggtcggcctcgagttcccgccgacgacgggttggcggcgcgacgagctggcgttcaggctcgcgttgttggcctgccaggtcgagctcatcgcttgcttgcgtgtgctggctgaggcggcggagagaagggctgaggtggtcggaggggaaggtcaagagctgagctcgccgccacctcgacgacctgcctgccgacgtccacgaaccccctcaacttctccccgttaccctcgatagatcccagctagcaaagatggctcctcgtatgccccgcgtctacgtgatccgtgcgtgtgctaccatctcgggctcttgaactgttgtcagaggcgacctgaccccttcggccctcgccggtccctctccccctctttctgacgcgcaggccacggtacgtccttccccgctgctcgcttgagcgtccgatgtgagctgcaacgctgactgtccatgtgactgctgttgctgaaggcgagactgagtggagcatcaacggtccgtcggcttccatactgccttcacgcctcgagctgccggagctggacgaatacgctgtcgactcggtgctcgacccgtcagccactcaggagctgacgtagtctcccttgcctgcctgcaatgaccttctatctacaggtcgtcacgtacgtccggccttaagttgtgcatccccatccgctcgaagctgaccaggccctcacaccctgggcgcgactccgtagaccggcgtttccgacatcaacctcacggccaacggcgtcaaggtcatggccgagaacgcgcccaagatggtcggcgagggcagtgcgtgctctcgctcgagctggcagcgagtacctcagctgacgctcttgtgcactcctgtcctgttcagagctcctcgacccgaagaagctcacgcacgtcatcatttcgccccgcctgcgcgcgcagcggactgccgagctcctctttgcgtcagtcagcgacgagcagaaggagaagatgaactggcagacgaccgaggaggtcggcgagtggcagtacggccagtatgagggtctacacgtgcgtctttccatggccgggcgctcgctctgactccgacgtgcgcgcgctggtgtctgcgcgttgagagcacaagaacttacgacctctcgttttcttccagagccacgagatccagaagctcaaccctggatggcggatctggcgcgacgggtacgttccttgcgcgcgagtgcgaagcccttggctgtatcctgatgaccaacgatcctcccgtctgcgccagctgcccgtcgtccgacacgcacaacggcgagtcggccgaggagatgcaggcccgcgttgacggcgtcatcgagaaggtccgtgcgatccaccgcgcggccgaggaccgtggagccgaggcggccaagctcggcccgtgcagcgagaaggagcgccgcaaggcggccgaggacgccgacgtcgtcattgtcagccacggccacttttcgcgcgttctcatcgcgtatgtactatctttagcgtgcaggatttcggaggaatgctaaagtacttgtctgttcgatcagccggtggtgcggctttcccctcgaggccggcaccaacttttcgaccgaccccggagggcttacactccttggctaccagcacggcacgctcaaggaaccctcggtcctcggcgtcaactggttcagcgaggattcgctcaacaaggctggctaagaggcggtcctcccagagatttagagaggggaaggcgcgatagatgggcggtctagttttgcgaataagtcagggttcgactgagcgagcaggatccgtctcgaccggcgcctctgtgacaagctggatgtcatgtatgggcacggcatggtaggtgaggcgagaccgacaggctggttggggaaacggcgatacaggggaattacaagcaagtgagcagcagaggtcgatgagcgagtgaggaaaaggcgggggacgggagacgacggggtgttgagggtgcaggaccagagagagggcagatgaaccgatcgagaaagaaagaaagcaaaggaaggccgacctgaggcggctctggggcctgccgagccagcaagcgaaagacggaaacaaggctggcaactccttgtgccggggtcgcgaatcgctcagcagcccatgacaaagacgtcgaggtaaaccatcgacggcgggctagccgtcttggccgaaggcattggtgctttccggttgagggtcgagctcgggccaatctgcgacgccgcagagctccgtcgccggtggctagcctccttggtcgtcgagtacgactgggcgaggaccgtcccgagcgccgtcacgttgagcggcttcgaaaggaaagcgaaaaagccctcgtcgatgacgagatcgcgcgtgcctttatccgtgttagccgtgagggcgacgactagcggcggcgggatgccgaccagaggcgaacagctgatgcgcttgttggcctcgtagccgtcgcaaaccggcatcgagaggtccataaagatgacgtcgtagcgggtgccctcggccgcatcgacggcctgctcgccgtcaaagcagcagtcgacgtcgcggtagccgaagcgctcgagcatcttgcggccgacgacggtgttgacgctgagagagcgagcacgggggcacatgaaatgtcagcgctcatatgggtagaggatcagatcgggcccttgactgcgacgcaccggttgtcgtcgacgagaagaatcttgagcggggaggtctcgccaagtgtgttgtcaaactgcttgccaaccttattgagccgggcgacgttcgttgtgacggccggcgctgccgacgtcatcggccggatcatctcgtagagcgagtgcgtccgcaccggccggacaaggacgttggccgagtcgatcgtgaactttttgacgaccgagctccggtcaagcgatgtcgtgagcaggatgatctgcgccagggtgggtcgaggtcagcgactgccatgtaagaggaggccgcgggcgccaaaacggaccttggccttgggctgcatctgcttgatgtcgcggaggtcatagtcggtgatgagggcagcgtcggcaaagacaaagtctgcgagagcgccgagggaagacagtcagcaggagtcgatagccgacgacgcgatagtcgagcgcgactgaccgtaagagctgttgacgagtgcctctgggttgcccttgcgcatggcctcggcgtaggtcggcgcggtgcgacaagggaagacgcggtaggcgaccaggctgggaagggacgggtcagtcagcgagcagctccatcgcgggcaacatcgaccttacgcactgcttttcgagtgtgcggcgcatcgcacagccccggaagatgatgaaggccgacttgggcatggcgtgcgccgggctagggtggacagtcgggcttcgcatgtcagtcgagtctcctagaacgacgctcgcagtttacaagcgtggtcagacgcaccggaccggggggacgctgtgaatgttcttttcggcgatgaacgagaacgaaaaagtcgcaccctcgccgggcgtgctgtttgcccaggcatcgccgccgagcagattggcaagtgattttgagatagccaagccgaggcccgagcctgaaaggacgcagcgcggactcagcaacgtgatgtatttaacgtcgacaagcaagatgcgaggaggacgtacctccatgctggcgagtggtggtcgaatcgacttgcgagaacgtcttgaagagtcggtccatctctgcagagaagagcgatgttaagaggtcagagacagaatctcctcgggtcctacgcgtgatgctaacgcactgctggcttcgatgcccggtccctggtcgagattcgcgctgtcagtaaggttgctgcggagcgtcagttgaacgacaagatggacgcacagtgtccttgacgctgatcgtgatgcgcagcttgtcgtccacggtctcagcagtcgagtgcacttcgacgacggctttctcgttcttagggcagaacttgcacgcgttcgagagaagattgagcctgtcgaggaaaggcgcaagcacgaatgtcagctagcaaagcgatgcacggcgagaaatcgagacccacaggatctgcttgacgcggaagctgcgagagccaaaggacggcaaagggtcagcgaaacggatagtgcagccaggcggcaaaggaaggaccgcacgagtctccgagaaggccgcagggaatgtcctcagcgacgccgaccgtgtagacgacctcgatgcccttctggacagcggtcgcagcgacgctttcgagtgaaatttcgataactgtcgcgaagggacagagtctgtcagcgaggcttgcaaccagagtctggcgggcgacgcacgatgccgcaggtcgagagggatcgactcggcgacgatgcctcccgcctgaatcttgctgatgtcgaggacgttggagatgaccgtctgaaggtcctcgccggaattacggatcgtcgtcaagctctcgcgctctgagggtgtcagcgtggccgagtcttcgaggacgctcagcaagccgaggaccgagtgcagtggcgtccgaagctcgtgcgacctgtttcaacgcaggaagtcagcatcaaggcgcagcttgcagtattttgagcgctcaagaacaaagcactcggtcgatgacgcacatgtgcgacaagaaagtcgtcgtgctttggctgtaaaggagagagacggtcgtcagttggccgtcagtgagcgcgagtaggaggcggtaccggccaacgcacagtgcgctctgaagagcctgtcgacgtacgatggagatgaaaagggtcagcagagggcgccgagagtcccagtcggcgcgcaaatttacggacctctgtccggcttgcgacctggcgctcgagctcggatcggttctctgtcgactcgatggcgaccacctgcaatggcccagatgaagtcagttggacggcccttcgagggcgagggccaagtcgcagacgcaccgcgaaggaagccagactctggatcatctcgatcgacgccgcggccggcgaggtcgccgaaaagctcttagagagaaggagcacgacgccgcggcactggccctggaggacgagcggcaagacgatgagggatcgcggcagccaacccttgaagaacgggtcgggccgccggtcgaggccagcgaccgtcatgacgggcttgtttgtccggaagacgtgcaggatggtcgacgtcggacagagctcggtcgccgagctcagtgggaggtcgtgcgagaccaaattctcatacgtgccacttgcgcggaggttaagcgaggcggaaccagagccgccggagcccgacgacgacagggcgagggcgccgtatgaagcgcgcgagaactgcgcataaggagtcgagtgtcagctgatccggcgcttgcgccaaggataggtgtgtatcgacagcagggcgaacctggagcaggatccgcatcagctcgaccgaaatttggttgccgctctgcgccagcacaagcgaagcccggatgaacgtcaaactgtcgaggtgatcggttttggcgagagggtcgtcactgagggctgtcgtcgagtgaggctcagacatggtctcggtcgagccggagtcgtgccgcttgacgagcggtgggatcggaggctcttcgactggagccggaaagtaggctgaaagcgtctcggacggcagcgagaccgagggcgtcgagggctccttgccagtccctgggaagtagctcttgacgaggcgcacaagcgcgagcgtcttggccttggtgaaagaccggtgagcagtaacagcataaccggcaactagcggcgagtcgtcacccttgaggttcgcgagtacgcgcgcccacttgaagctcaacaggcctgcggaagaatggaagcagcgggacagcttagcgtcggcgacgaaaaaaattggctcggcttggacgtgaactgacctcggaggaaggagaagtcttcccgatggagagtgtcgagcgcctcctcgaccgccatcaggcaggccgtccagcgagcgggctcgcggtcaagttgccggatggtccgcgccgtctgcagcatgagcagcatcattgtgaagtcggtcgctggagagcgagcaagcggcagccagcgaggcgcggtcagcgatagactagcaggcagcgaagcgcgggcggtcattcactggtggtgtacttctggagctctgaaactttgcggtcggcgtcggcctggtcctggtcggtgccttcggtcaagaagtaccaggcgctgacgaaaacccagactgagagtgcgaagcagcgctgtcagcgcaactcgccctctgatgagcggatgggcagggcggaacggacgcggaaagaggatgacgcccgagaacgggcggtagattgcatctccctgcagaaccagaaggatcagctgcgggcacaatgcagacgacacttgaccagcgagcgcgaacctgcttcaagaccgggtcgatctcgctgcgtggcgcgaaaaagacgaccttgaggaaaagctgaaggaggctgaattcgagtgagtacatcggcagttcctgaacgacagccaggtcccgcggctggtcaattaggcggccgtcaagcgctgatgaagagggagagtgtggacgtcagcgatagcctgcggcgggtcgccctacaaaggactgtgccgactcactgcgcagccgctcaaacgggcgcgacgtgtccgagaggttctcgcaggcttgcagcggcgccttgacaaatacttggcctgcgaaatgcagtcaagatgtggttacaggggtcagcatcggtcgcttgaaggccgggaaacacaggaggtcgcactgtgcggcggcagctgctcgacgatcgtgtaccagtcgacgagctgaccctcgtgatcgagcatcgactcggtcgagaagagcatcgtgatgaacgcgagaccgaggacataggtgccggcctgaggagcgagagggaggggtcagcttcggatagggatgagtgaggatggaaagtgagagcgacgcacgtcccagttgccggatgcgacgctagattcgtaggcacgcgcaaactcggcccggaggaggtgcaggttcgtccactcgtggagctgcgcaacgcagcagatgaccgtcgcattctcaaagaagccacggacgttcagctgcaaaagcagaggtgccatcagtctctgtttcttcggaggctcgacaactcggcgtcttgcaccttttgggcaagctcaacgcaggccttgcggacgggtagcgtcgcgaccgcctaatcaagaagcgaacagacggaaaggtcagcttgaacaggaagggccgactgcagctcatcggaaaggacacgcacagtgacggcccagacgccgtacagataggccgtgtagtcggcccgcttgaccaagggctgcgagcgaagccttgcgcagagagcgacggccaggttgaagtaactggacggagggccgagttcagggtcagcaagctcgcaaagctcgattcgcagtgctcaactcacctctgaccgtggtcctcgcgagagacgtagatcgcaggactggtgcggccgagaacatcaatgtcagcgctaggttgaggaaagcaaggggacaggggagcgtggcactgacccggcgtagctggtcagcttgcagacgagcacggccatgttctcctcctcggccgagccaaaccacgtgcgatcggcgtctagatggacagccgagacgtcgtccagtgtacgcggaaggctctcgtccgatatctttgtccgcagggcctcagtgaagccgacgctgtcgatcgtatcgaacgcgaccgtgacgccctccgaaaggcgaccacagttgatgtagagccggacgagtagggttcggagctcgatgaaaagcgtgtcacgccgcggctgagacgagtcgccgtcgacaattctgatcattgattcgatctgcgtcagacgaacgatcaattggtgagcaagagggtcgcgggacgcaaggattgtcggtggagggtacgcaccttctcgatgccaaggtcaggtaggtgctcgatcgcacagacttctgcccaagactgggcaaacggcagcgagcactcttcggtgaggttggcgagctcgtcggcgaaacggaggtattcgagcgactgccggaacgcggccgcccggttcgcccgcgcggccgccttgagcgcgagctgggcaaggttctgctcgtctttgatggcatagccgagcgaacgggcgacgacaaagcaatcgacggctaagggagtgaggtcgctgcgggtcagcagagaacgagagcgagcgcaaggaaagtgaagctggccgcactgtcaaagatgttctcctcggcgaggccggcctcgagcatccactgagcaatgtgatggtgaattggcgccttgcgcgtcttggggatcagagccgcactcgcggtccgctgtttgtcgtgccggaagcggacgccgtcctctcggacccagacgacgccagcgttcgacgccgggaacagcgcggcccgagcgtcagtctcggacatctgcgtcatccgggcgaggtaagcgagcttggttccgctcgaccgcaggcaggcgaggatctgagaatggtcagagcagccggatgtcagccgaggaggctggcgaccctgcagccagcgacacgtaccatgagcagctcctgcgtcgcggagtcaaagctccggaggaccgactcgagaaatttgtcgatgccggccgtgtgccgggggaggtcgtcaatgctgaacgtccagcgcatcttgctccagtcaaacgagatgatgccgtctcggacgagctggcagatgaggctcgcctgcgaagcaaaggcaagcgcaagcgtcggtcagcagggcccgagccgcgagcacggagcaagttgaatgcaggctgacgcacgagaaacagcggcgagccagacgtctggctggcgagaaagttggagaggtaggcctgcttcgggtcggtctcgccccagtggaagcactcttgcaaatagcgcgagatagccggccggttgagcttcggcacgtagagcatgacggacgggcacagcacctgcccagccgtcggtgccacgtcgctctcgccgctcgaggtcggaccctctatccggtagccggcgacgacaaagacgtgctcgagccgggacgcagagggagcgagcagcttttgccagaacggcagctcgtcggcgagccactggatgtcgtcgagaaagacgacgagcggccgctcggccgtcgcaaatgtctggagcacgcgcttgagccagaagcgggtcgagtcgagaaagtgctcccagtccatctccattgcctcgtcgttgaacggcggccggtcgacaagcaggacgtcgcgccactcggggccgatcaggttgaggaacaccggcgcctgcgtgccgagggccgtcataattctgcagggcgccaaggaaagtgcgcagtgtcagtgccgagtcgggaggcgaccagtaggctaggctaccgcgcacctcttgcgccactcggccacgtcctcgtgcggatccgaaaagagctggtcgagcaggctcgtgaagagctgaacaaagccgttaagcggcttcttcatgtgctggtcgagcttggcccagcccatcagcggcggccgacgggtcggggcgtgcctcagcgcacggaggcccttggcccacgtcttcatcagctcagacttgcccgagcccgacgcgccccagatggtgacgacgccgagaccgccctttgaggctgacggcccgtaaatcgttcccagcaggtctggctcgtccctgacggcggccgagttcgacttggccgacgccgcggtcgaccggccgttgacggccgtcgccgttgctttgggatcggtcgtcgcgaggaaagcagcgtcgagcgaaccgagctgcttctcgcgcgcaatcaggcccggcgggaggataaagcgcgcggctcggtcggcctcgccaacggtgaagagcgacatgtcgccgttggaggtcgtcaggctctggaacgtccgcaggtcgtgcatgagcggcttcatcgacgagtagcgggccgaggggtccttattgaggcagtaggcgaggatctcgctcagccgcggcgggagcagatacggcgtgctctttgacttgacgcggtcggcggctgagacgaccgagtggttcagatgccggtggacgtccgacaggaggtcgacctcctcgtggacgggctcgaccggcgaacgcgtgatgagctcgtacgcgagcacgccaaagctgtagacgtcgccgacccgggcgtcacgctcagacgggcccgtctcagacagcgcctcaggcgcgatccagcgaaggtggtgtttgatgaagtactcggagttgaggccgcccgaccgcgcgccggatgaattgacgtcgccgtcgccggcggccgaggcgttgatgtcgaggctgtgggacgagtcggccgaggacgagccggttcgcgagctttgggcgggctcgccggcgccgttgctgctcccttgcgaggcggcagggaccggcggcgcatacgtcatgccgacggccgagggcgagcccagcgggaccagctggctgcccggcggcgagcgaggcgtgacgctcccgtcgcggttgccgttcgtcgggacgttgagcgactggcggccgatcgcccggcgcttctcgatatcgggcggcatgttgagcgcgctcgcttccggcagcgtaaagccgtcgatgccgacggcggccgagagatcgacaatctcaattttgggctcccactcgtggatcgccttgtccgagacggtctcggccgccggctgcttggcctcgtcggcatcctcgtcgaccggcggcttgaacttgacctggaaggcctcaggcgtgcagatgccgatcgcgaggtgcttgtcgtgtaggccgtcgaggacctcggccatctggatcagaacatccatgacgagcccgccgtagcgcttggcaccgagcctgtgccgggcctcgtcgtcggccgaggcctgagcgagcgcctcgtccgtcgtctgcttgccctcgcgctcgacaacctcggaccagtactcctggaggccgagcacacgcccattatcgtccgcaagaagccagcttccgtactcgtcgtcaaagaagccgaggatccggtcctggaagggcgccgcgagctgagcagccgcctcggccgcggcccgagctccgccgtcggccgcggtcgacgccggcgagtcggccgtcttgagcgacggctcgctgtcgtagactggcggccggaccgaagccgcactgcgcgagatcgactggccggcgacggccgacttgtgctggagcgccgccgacgagcgcgacgacgtcagaggaaacagcgtttggttgcgcttgaagaggcggatggctgccgagggcaagagcgcgcactggtcagcaggtggctcgagcacccttttcgagcagctcggtcacgacgcaccctcgcggtcccggctcgagacggccttgaagcggaccttccgcggaaactcgagcgacttgagcgcccatcggtcaaggaacggcgagccctccttgggagggtttagcgtcgcccggcccgagagcgtcgggtcggtcgggaccttgccagaaaacgagtcgaggtgcacgtccgagaggcctttgccggcaaagtcgatgccgtccatggcggagaggatgcgacggcccgttttgtcggtggcgggctgaggcaggcgcggccaagggacggttgggaaggaggcgctgccctcaggtgttggagctctctgaaaccgactgccgatgtagataggttggaaggtcggatactcgagtgggctggcgacggatgtgccggctgggctagctgtgcgaagacaacccgacaggatggattgagcccggggcttgcaaaggccggaggacgagcccggagcggcggcggagagcgagtaggcgttgacgtaccctgctgacagcggtgctcgagctacgggcagagaggatagaggaaaggaagcaagtcacgagccacgaaaggagcagaggagcaggaaggaaggggtgccgagcgagggcgtgtcggaggaagcaggtcggaacggcagcagcgtgtcgatgcgggccctccggcagcaggcgcccgggaggggcgggatgccaggcttagagcagggtgccaggctcatcctccgcccgcttcgctgagcagctcagcaggcgaggcacccctctctctctcccagcatcaaccactcgcaccgtcgcagctgcagctagaccgacaagcagtggcttgcatgccttaagaccctttctcccggacgcctaattccctcttcctcttcggacgccctccggcccgcgctcagcgcctctgatgacgccaacctcgttcgaaccgacggccagcgacgacgacgacgaccttgtcggcaccggccctggctcagctaatgctgccagcggcaaccaacgagcaatcccgctccgtctccttggtcgtagcggattggccaggccaggcggggcctcctcttccgcctccagcctctacagctcgaatggcagcggaagcagcagcagctccggcggccgagcggctggcgcctcccgcttccagtcacgctacgccgctggaccaagcggatggcgaggagcgcagcgcaccgggctctctgggagtgacgagcgggatgagtcggtcggcctgcttgctgctggcgccgccactgagcttgacagcggtgaaaacgacgacgacggcctgggcagcgtccgcagcgggcaacctcgagagcacgacgtgcgtcctagccctcggcgaccactaattttgagtctgctgctcgcttgcttcgagcgcatgagctgaccctgatcgcttctttgctttgcgctttactcctgcttttcactcgtctttgacagaagcgggcctcgacgcatgcaccccctcaagaggggacccccgatgcttccctctccgccaagggcggatcctctgtcaaggcgacgacgctgacaggaaaaggccggacgatccctcttccacattctggtatgtttgccgtcttctcggctgtctctgtataggagaagctggtcggctgaccgccgctcgtccctctgcgctgcgcaccctgttcgtgctcgccctccctccccatccgctagcccgctcatctcctactacagccagccgctttgcgcccaacgtcgtccgcaatcagaagtacaacccggtgacctttctcccgcttgtcctttacgagcagtttaaattctttttcaacgcctacttcttggccgtcgccctctcgcagttcgtccccgcgctcaagatcggttcgtcttgcgccttttgccccccgcagcttccgattccgtcaggctgaccgtgcgccactcctcaggctacattgtcacctatgtggctccgctcgctttcgtcctgctcgtgacgatggccaaggaggcctttgacgactaccagcgctggttgcgcgaccgagaggccaattcgacgcgctacctcatcctagacagcggcgcctcgcccagctcgacgagtaccgacggcgacagtagcaacagcagcctcggctcgacccgcgccgtcccttcctccgcgatcaaagtcggcaacctcgtcctgctcgagaaggaccagcgcgtgccggccgacctcctcctcctccggacgtcggacgaaacgggcgggtgctttgtccggaccgaccagctcgacggagagaccgattggaagctccgcctggccgtcccggcctttcagacgttgacagacggcgggctcctggccgttgagggcgaggtctacggtgagtggccgccgtcatgactctgcttcgcgatcatctccaggagcttacaagggtccatcttctcactcgactcgcccatcagccgacccgcccatcaaggacctccacaccttcgtcggcaccatcacccaccggccgctcgcgcctctgcacccgagctcgcctcagtcatccagcccagagggcgatctccaaacggacccgctgacggccgacaatctgctctgggccaatacggtcctcgcctcgagctccgccgtcggtctcgtcgtctacaccggccgtgagacgcgggccgtcatgaacacttcgcggccagagaccaaagtcggcctgctcgagcacgaggtcaaccggatcgctaagattctctgcgcagggacgtttgcgctcgcgctcgcgctcgtcgggctcaatggcttccgcggccagtggatcgtctacacgtttcggttcctcatcctcttcagctccattatcccgatcaggtgacgccgacctagccctctcgtgtgcttctactgactcttcagctgactcgctcgcgcggtcgtctcagcttgcgcgtcaacctcgacatgggcaagacggtatacgcccacgcgattcagaacgacccggagatcccggggacaatcgttcggacgtcgacccttccagaggagctcgggcggatcgagtaccttttgagtgacaaagtgcgtcggctggctacagctctcattgcgaggaccaggctgattctcgctcgagtcgcctctcaaagaccggcactctgacgcagaatggtatggcccgggctcacgctcttccaacagcttgccatgacgctgatcacctcgacggcccacagagatggtcatgaagaagctccacctcgggaccatgtcgtacggccaagactcgttcgacgaggtcgcacatcagctgtcgacggcgttcggtggcggtcctggtccgtcccgacgatctcctgtaccgggtcataagggcttgtcatcgcgcctactgaccctccttgcgtcacctcgacagcccaaggcattcccggccgacgaacctcggctatgccgacgggcgctttcctcgccagccgcggccggagagacatgtcggccaaggtcaaggacgcgctgcttgcgctcgccatctgccacaacgtgcgtgctggacttagtgtccaacttcgagcgatcgtctgaagcgaggtctgcctttcacccctgttcctgtctcaggtcacgcccgtggacgaagatggcgagctcggcaccgtcacctaccaggcctcgtcaccagacgagatagcgatcgtccaatttaccgagcaggtcggcctgacacttgtcgcccgcgatcgatcgtcgatgacgctccggctgccagacgggatgacgcagcgcttcgaggtactcgaaatcttccccttcacatctgaatcgaagcggatgggtatcgtcgtccgcgagagtgcttcgggcgagatcacgttctacgagaagggcgccgatgtcgtcatgggccgcatcgtccagcgcaacgactggctcgacgaggagacgggcaacatgtcgcgcgaaggcctgcggacgctcgtcgttggcaagaagcgcctcaccgccgagagctttgaccgctttgcgcgcaactaccgccaagcgcgcacgcggacgaccgacgaccgagccgaggcgattgcagccgtcgttggcgagcttgagcacgaacttgagctgctcgccgtcaccggcgtcgaggacaagctccaggaggacgtccgacccacgctcgagctcctgcgcaacgccggcatcaagatctggtgcgctactggctgctgcgggcgcttcaagaagacgcgagtgggctgaacctcctcttcctgcctacaggatgctgaccggcgacaagatcgagacggcgacctgcattgccatctcgaccaagctcgtctcgcgcggccagtatatccaccaggtggccaagcgtccgtccgaccgttgctttctcgcagtcgaagcagactgctgaccctcttctcgctcgccctcagtgagcgacatcgacgccgcgctcgagcagctcgactttctacggacaaagcttgactgctgcctcgtcatcgacggcgactcgctcgagctgttcctgacgcagctcaagactgagttcatcgagctcgcgacccagcttccgtgcgtcgtcgcctgccgctgttcgccgacgcagaaggccgacgtcgctcggctcatccgctcccacacgtgcaagcgcgtctgctgcatcggcgacggcggcaacgacgtctcgatgatccaggccgccgacgttggtctcggcatcgtcggcaaggagggccgtcaggcctcgctcgccgccgacttttcgatcacgcagttctcgttcatcaccaagcgtgcgtcctgccgtcagcacctctggcccgtctgcgctgatcatcgtcgcttgtccctagttctgctctggcacggccgcaactcgtataaacgctcggctaagctggcgcagtttgtcatccatcgcggcctcatcatcagcgtgatgcaggccgtcttttcggccatcttcttctacgcgccgatcgcgctcttccagggctggctgcaagtcggctatgcgacggcaagttccctgctgcacgtcctttgttgacgagctggcgctgaccgctgcctttcctcgctcaggtctacacgatggcgcccgtcttctcgctcgtgctcgaccgcgacgtcgacgaggacgtcgcgctgctctaccctgagctctataaggacctcaccaaaggtcgctcgctgtcgaccaagaccttcctcgagtggtgcctcgtttcggtcttccagggtgcgtcgatccctcacgtctacaggctagcacgccgaccgctgacggctttctcgctgtcgcaggcggcgccatcatgattctttcgctactcctgttcgagaccgagtttctcaacatcgtcgccatctcgtttacggcccttatcctcaacgagctcattatggtcgcgctcgagatcacaaagtggcacgtctaccaggcggtctcgctcatcgtgacgctcctcgtctatgccggctcaatggtattcctgccagagtacttcagtgggtgcctcttcggcttgcgtcagcggaggccatctggctgactgatgcgcctctcacttcagacctctccttcgtcctctcgactggtttcatctggcgcgtcgccgtcatcatcggcgtcaggtgcgttgcgctggccagcgtcttcggcgcaattggccgagctgactctggagcttgccttccagctcggtacctctctacatcctccacatcttccagcgcatcttccgtccagcgacctacgcgaagctggcggcctgattcatctgcgatgcccctttgtacaaggcgcttcatcccaaacgacttaccggctgcttcgacctcgcactccataaaatcgagcccgcagcacgatcatcaactcctcaccgtcgccgtcgccttctacgttccctccccctttgatgctgacgctccgaggccgcctgccaggcacgccgcccaggcaccgcgagatgacgcgacgacgcgacggcggtggcgcgcgcagccgacccaacgccttggcttgcccgccttcagcccgaaccgacgcgccgagctgtcgacgaccgagctagtaggctgacctccaattactctcttgccattcctgcttgcaccgagctgccccttcggccagcagccgaccgacatgcagcacgctttcttgctgcctcgacagtcgacgcccgctcggtcaccgtcttcagcccaccggccgccgcctctgtttatccccgactcgccgctacgacggctgtcgaaactcacgctggagcaggtcgccgagctggcggcccgatcgacccatgacagcgataccgacgacgagggcgaccgctggagcatccccatcttcctcgctggcgacgcctcaaccgctgatgttcagacgacggcggcctgtgacgacaagacgccccgccagctgctgtaccttccgatggctgtcagtaatgtcagcggagcggccggcagggtcaacgacgacaccatcggcctgctgtcctcgccgttcttcgactcgagcacccctagacggccgaccggcgctgggccacgtacgccactcgcaggccattcgcctgtcgtcgaccgcaaggtctcggccggctcctcgggcagcgacgaggcgacgtggtcgccaccttctccgtccgagctcatcttcgttttagcaaccgagcacggcagcctcccagataacgccgtttctgcacgacgcaaccgccaagcacgcggccctcaggactcgatctggcggcactgctcgcctctccggtcgtcgtcggatccagacctccccggcgagtcggacggaagcagtctgttcgacccgggctacagcctcgacgcgcaagcgtcagctgggtctgtccagcgcggcccttcgccctttgatctgagcgaggacgtcaaccggtcgaggctgcctcacagctcaattctcccccgctgtccctctcccctcgactcgaccttcatggccgtcctctcgtgcccgccggtcaactcggagcgcgccggcttcacctcccaaatggccgtcaatgccgcgcagaagggcgagctgcgccttgtcgtctggatgggtgcgtcacctctcttcctggcaacgtggcgacattgctccaacttcttgctgtttcgcccgtctcgcacagaggacgacgagggccgctcgttcagcggctcgctgccgttccgccggtacaccccgcctgtggcagacgtctctctgacatcaaacggccgcgccgaccggggcaaccgctttgcgtccaacggttgcgtcgagtacgctgcatacccaagatccagcccaagttgggcaatccagccagaggtgcatcccggggtgcttgaaatgtgatcggcagtcgctgacccactctcttctctgatcgcagtcggagggcggcccgtcggagctgcgactcgtcaaggtcacgctgagcgacgatgaccggcggaactttgtcgcaccctgcacgaccccggccagcaatgcgccctgcgtcgcgctcgacgactttggctcgctcgagctcgtcgaacaggatgagcagcggccgcagtgggtgctctgctacgagattgacgtcgattcagagcacacggtcagtgatgattgctcgctgcagtcgccgccgccccttgctgacgcaggtcgcttgacatctcgtctcgcagacgatcaccttgctctcgttcaagtgcgatccagatctgctcgaccgctctcaggcagtcgaaaccggcaagccgcgcaccggcggcggcgcctttcgccttcggatcggctcggcggcggacgctccttcgagactctccctgccccagcggcgcctgaactcgatcccatctagccccgaagcgttcaacagcctgaaattgcggccggcagcgtccgaatcgaggctcatgctgctccgatcgccctcggcgtcgcccgcaccgtcagccgcctcgtcgcctcttgcctcatcatcgccggctcattcgacattttcgctcttcggccggaagcgcagcctcagctctgcccggaccgacccaacctcaggcccgccagtcgtcgcgccacgccgaagtcacagcttgcgctcagccgggtcacttctcgacggcctgactccgggcaagttgcttgcgagggacgctccgagtcgcagctcggcacctctgccgttcgtgccctcgtccgtcacgtccggcagcggccaagacggagcgtccaaagtccgctcgtctcctggccaggggctgccgccttcactcgttgcgccaccgcgccagccgtcggcaacagccgtctcgaagcgcaagcctgcgacgggctcgccgaccaagggcgctcgcagcgggctaggctctgcaaagcacctccgcgagcggcacgtcactgctggttcgtggctcttgtgagcctgcgggcgagtcagcggcctggaagatggatgcagctctgtgacgcgcacagcgagaggacgtcgggattgagagaaagagcgtgcatcttggcaatcgtcctcctcgccgccaattgacgcgcgtcatcaaccggcgtcgacggccctcaactcagctcgcgggcgcctctaccagccaccgttccggcgcgtgcgacgccagaagggcatcagccgcttcagcttggccgtctgcgccttgcccgtaaagatcatgatgttgctctcgccgcgcttgatcgcattgtccttgcgcttgagctggttcgtgccggccttgacctgagggcgcacagaggggacgagaggtattcagtcagctcgatatccaacgtgggtcacgcaacccggacgccaggacgtacgtgcttgaactgaaggagcgggaaagggtgatggctctgatcagcatgcgagcgacgcgccaggctggccacgaggccgcacgaggccgacgcaccgttccgttcttgtagctcttgaagcgcttcttggctccggtatgcgtcttgggccccgacgccttggccagatgcgggatccgaccgaggtgcttgcgtcggagcaggcctggccgaggcgtcgccagggtcgggctcatcgagaatgcccgcaggaggatcggccacctcggcgccggcgccgagcgagatattgcgagcgagggaaagatcctcgagagctgctgctgagcgcgcaatgacggacctgccgccgaggaccaggctgccgaggaggccgagggcaggaggaaggctgccgagcgatgggcggccgaccggcggagtgctaacgagacggaggcggcgaacatgggcggcagagagctgaagcggcctcctcgacagacggcggcggcggttgctagacggacgagagctgaagagagggagctcgcgctagaagctggtgctagtagagcagtcgggctagttgtggtagagaggaggcggggtcgtatcgaggcgagggtcaaggtcggaggggcgaagccgagcccgccgtttttggccagcaagactggcaggcgtggtcgagtcgagcaacggccacttcggacctcccgtcctttgcagcaccggtaggacttgagcacgtcgctctaggatccgagcagagcagactcgcttgacttcgaccccgagttgatgctccggagagccatgtcgatccgacctccctcccctgcggctgctgccgccgccggtgccgccgcgaccaccgcctcgcagaccacgagcagcaacccgaccgccgagccactgccgacgacggcagaggtcccgctctcgccttcgggcaagaggatctatccgcgcggccagaacccgggcctccgatacgccgagccatactactacccgtataagacgtacgcaaagggccgctggctcggacgcgagctcgtgcgtccacggcgctcgtcgccaggcgaaggtacgttgcaagttgttgaccttcgtacctctgcgtccttagctcgaggttgtcagcacagagttccgcgaccggtacgacgacgttctttttgatcgagggtcgctgatgcaccggccaggagacccgaattgttactagctcgctgacctctgcatgctgcgctgcctcttgcctctacagttccgtcgagtactatgcacgcccttcatcactcttctcctattcctctgtcgccgcgctgacttctcgaaccaacctaccagcgccatgctcttgaggccggtgtcacgacgctcaacggtcaggttgcaacgccaacgacgatcgtccgctcgggcgacgccctccagtgagcaatccctcttcaagccaaagtgcgacgacagactgacctcgctgtctgtgcccgtccaggaataccgtccaccgtcatgagccgccaatctcgatccacccgatccaaatcattcacgaggatccgaccggccagtacatcgtcatcgacaagcccggcggcatgcctgtccatccgaccggccgctttacaaagcacacggtgaccgagacgctcatgagtcctgctttcggctacaagaaggttcacagtgcgtctcatgcggccttcgtcacctgacccgagcgcctctgacgtagtttgacctgcttcgccctttgcaaccctccgcccagccgtcaatcggctcgaccggctgacgagcggcctcatgttcatcgcgctcaatgcaaagacggccaccgacatccaggaagagttcaagtcgggcacgatccggaaagagtacctcgcccgcgtccgaggctgctttcccgaggaggaggtgacggtcgaccagccgctgctgaccgtcgaccggcagtcgggcctcgtcgtcgtcgctcccgaggacggcaaagaggccaagacaatcttccagcgtctcttctacgacgccgcgcgggatcagagtgtcgtccgctgcaagccaatcactggccgaagtgagtgacctgacgctcaactcaacgcaagccggcgcccgctgaccctgtcgtcacgcatgaccgtcgctcagcccaccaaatccgcgttcacctgcagtacctcggccacccgatcccgaacgacccgatttatggcgaggaggaggtctggtcggcctgcgtgagccaggccaagggcggcatcgacctgacgcccgaggacgacgcgaagccgacgcccgactatcggccggacgacgcgctcgaggtcgcagataacaaggcgacgatcgagcgccggctggccgaaaagacagaggcccgcgagggcaaggagacggccccggagcgcaagctcatgccgcgcgagactggggaagatgtcggcagctcgagcccgatcaagctcagccgagaggcgcgcgaggtcatccggcgcctccgacggatgaaggacgagcaagaggactgggcgcggttagttcgaccccttgcctcgcgaacgcgacccgcggctgaccttcgacccgctccgcagctggaaggacgtcgtcttgtacacgtccgaggcggacaagtcgccggcgatcatccagtcgctgtcagcgagcttcgtgtcagacccttcgctacccaacaataagttctcggaccgcgactttagcaaggcgcccaactcgcgacgcggctcggcctcgtcgtccaagtcggccaaggcgctcgcaaaagagcaggccaagagcggccagtcgacgccggaggcagcccctgaggcgaacgagccaaagaaggagcaggagggcgagaagtcgaccgagaccaaagttgcccctcccttcacgccgccagagggcttctgcccggtctgctatatcccgctcgcgcccgatccggacccggatagactcttcctctacctgcacgcgcggaggtgagtctctggaggcgcctgcagtcggcctcctgcgtgctgagctcacttcacgtctcgtacttcctccgcaggtacaagaccgccctgggcgagtttgagaccggcctgccaatctggggccgcgaagactgggacggctcgaactcgtggtcggaccgggccgtcggccagggagccggtcgcgaggttctccgtgtcgtgccgcccttggagccgatggcgctcggcgagagcacgacgacgctgcaggaggatctctagcgatggtctttcactgcgcaccgaaaacaggctctgcatcacattgcagagtcaagttccctctgtacgaggcgctggaacgagccctctgttaaggggggaagcggagacgtcagcgtcgtgagcatctcagccggaggggggggggggtgcacgcacctttccactcgacctcgccttctctcaagcaggccatcaggccagcttcctcgatgccgtagatgcggccgccgccggcccgccagatgccctcctcgaccttgatctcctcgaccgtcgcgcctgccgttcgtgccaggggcaagacgaccggagcagtgccggccaggacgccgcgcaacgcttgcggatccgggtcgtacagccggtaagagagcgcctgcaggatggcgatgcctataagcgaggtgtagggtcagccacaagcctaacagagccgcctggacgaggggagcaaggaggcacggacaggtccggaagatgaaaccgtcgccctcaagcagcagctggtcccacacgcggcatgcaagcgaaaaattgagctgctcgacaaagagcgtcatgaaccaggtctctggcacgtggatcgagtttgagagcaggttgtagtagaccttcggtagaggatccgagcctgcaagaagcaatgacaggagcccgtcagcaaggctcgcatcgggcccctggaaccctacgaagccggcacgtacagagggtctcgaggactcgcgcgtaggcatcgcgctcggtctggcggcgaggatcgtagtacgcgcggaggacgcccgacttgaccatcaggttgcggagcatggtccaggctggcaggcgggcggacgacgatggtgaagatcagctcgcgcggcagagacggggctgagagcgagccgcacctgcaggcgagggcatgttcagcagagctgttgctgcaagcagatggaagcccgtctggtagccgaggccctcgtcgctacgagcctgtttatcagaagtcgtgcgtcagctggggcaagcaaggaaatatacggcccacgagtgtcgcagcgtacgcacgacgacccacgcgccaagaaactcgcgcagccggctccagccagccgagccgcgctcaaacatgccgaggcccttccacgagcgctcggcgtcgcgctcaagctcctcgagcgtcttgaccgggaaccggccctcgacgaccgccttgtcgaagcgctcgacgtgacgcgcataatctccccgctccgacaacgcgaggccgttgccgacgagcttgacccagacctcgccccgccagatcggagggacgccctcccaccagacctcacggagctggcggccctttcccttttcctgttgcgagcccgacgcgaggcgtgcgacctcggcctcgagcgcgccgcgggggtcggggaggagcgtcgagcgccagatcgaaagtgactgttcgtgcaactgggcgagcgacgcctgggactggacgagcgtcgacgtgcgcatcttgtctgaaggatccttgctgactgtcagcgtaaactcctctgagatgaacagtgacgcagacggaccgtgctgcttcgagtcggtcatcatcttctcccagtcgcgcaagtgcttctgatcctctgcagcgcggatgccatgtcagcgcaatgcacggcaagcgatcaaacggacagtgcacccaccatcgcgatccttcggcggcaggtgatgcggccgggtcttgctgaggaccttctcgaggatcgtcgcgttgccccggccggcgacgctcggccgatgctgcgcctggccgcccgagcccgagccgctcgtcgtcggcagcggcggaggtggcggcggtggcgagggcgtcggcagggcatgcgtgactggcgccgagagcgatgaggatcttacgaaggctgtgacgctgtctggctcgggcgacggcggcagcgacgggctgaaggacgcgcgctgatggtcccgccggccgttcctccggccatggctcgtttccgacccatcctcgtccgagcggccattggtgctcgtcccacttccaccgccgccgccacctcctcctagacccatcatccgcgagatgctgcccgatttccgatgggcgcgcttgatgtcgcgcagggtgccgtccggcccaaagccggtcgcggccgggtcgcgtgtcgtcggcggcggaggcgagctcgagggcgtgatggcgaccgactcgaacggaaccgagaggtcgagcgccgactcggaagcggcaggcgagggtgatgcggccatccaggggtcaggccacttgcgcacagaagagagggcgaggtggatcactgttcggagggagcctgcgagggcgcgcccgagatggaactgagcgcgacgacggacgatgccagcagacgaccgacagcgacctcctttctctccctgaagccctttcaaggtcataaacttctcggcgtcattcgcatcagtagcagcagaactcgcacacagatggctcggtcaaagacgcagactccgggctcgtcggcctcacctccgccggccgactcgtctgcgctcgcgtcgcctcccgcgttaccggcagcagcagcagccgacgggcccgacaaggtcaacgtctaccatctgccatccctcaagacggccttcgaccagtcgctcatctcggtgcgcgccagaaatgaccctccgctcgttgttcaagcctcgaggctgacaaaccttgatctgccgccttgtccggcatgctgtcacaccgctccttcgccagacgcttaccgggcccgactttgctttctcgcagtcgcacacgcacaccgacgtcaagctgttgctcggcttcctcgcgtgcggcattgcgctcggcagcacaggttgggtctactaccacggtatcggctgggaggagagcaaggagctgctccggcttgccgtcggcgcgtgagttcgctcagaggccgtccaggttggtccgtccgtctgaagctgacaatcaggcctgttcgcactcgcacagctacactctcctcatgctcgcctcgaccgcttactcgtggcaggttgagaaggggaccgtctttgttggcaagaagaaatcgctcgtcgacggccgggtacgtacctccctgagcgcatgcgcatgatctctcgctgactgcgatgatcattcccggcagatcgagacgagccacctgacaatctcaacaaagacgtcgctctctccagtgaccaagtcgcctctcgttcgtcctcccctcctttgcgcccgccacgcgtccctctccgcaagattgacgccgccacaccttccgcttgcaccagtaccaccctcacatcaccctcctccgctcgaccaacgccggcaaatcgctgctcgccaagcgctcgctcacgcccgagctcgagatgcgcctctatgcagacgagagcgggctcattgacggcgcggggctcgcagggtggctcgcgggtgtgctcggcgacaagcgggattgaagggggcgattcggcctgacatggattcatcaacttagtcatgcactcctctttgaccgagcgcacggccttgccgaaaccgtgaggccggccggcgacgctctcgcgggcaacagatcttcagggcagcgttaggccagcagacggccgtcgacattcatctcttctcatctctttcagagaggcgtgtctccgggagtacgggagcggggctcgtgcgtgcctgcgcgacgctcaggggtcggcccgtcaggagcctactagacaaccgcgagctcctctctctccatcgcccatgaccatcagctctcatcccccagccgtcaccagactcgactctcgccctcgctgatccttcagccagctacaagcaggtccctgcagtatgtcctatgcgaggccagggttgtgccgatcatccctagccaggcgtgccgagcctgggcactgacgaccccgctctcttgcctccctctcgaacagaccagaatcaagcctgacgatacccaaggaccagacgacctacaaggccggcatcaacacgctcagaagcagcagcagcctccccttcccgtccgagaagcaacggccggcggctccagagccagcatgccgttccttccagcccctactccgccctcatctgccgccgccgccgtcaccgctcggccgagcgagctcctcgcggccgccagcctcgacgtccaagggctcgaggaaggacgtcgacgatgcgattgcgcagatgatcgagcgcgagacgcgaagggccgagcaggcgatccgtgacaagctcaacctcgcctacgcaggctacgccccgccgccggcaactccgcccgcccggccgatggctgtcgctccgccaagctcgtactcagccgcggaggcggctgagcggcgtgccgccctcgctgtcagcaacatgacgctgtccgaggcggtcaagctgtcgatcgacctgacgacggctctgtgcgacctcgagctccgacccgaggccgggcgtgtcaacgtcgaccgggccgtcgccgcgcttaaaaaggtctccggaatcgatcagatgcttcgcaagcggctctgatggggcgggcagaggcgggaggaggccaaccgaggagggcgagatcgacatgcattcccccttgcccctttttcctccaacagatctcgttctcgttggccaccgtgtctgggagagccggtagcccttcagtcgtctgcagagcgactacgtctgcttgcgattctattttgatgctctgaatgtggcagagttaatgagcccaggcttagtccccagtcagaacgagccttgcttgcgcacgcgcccctgtcgcttccggcaacctcgacacccatcgctcgccgcatcgtctactagctgcgtctcgtcgcatacgcaactctcttccagaaaacctctctagacccgctgtcggtacgtcctacgtagactgggagtgcagccgcctgacgctacctgtcgatgcggcgttaatgatcggccggccccggctaaccctgccttctcgccggccgccagcgatgcccaagcagcctaagaagcgtctctacggctgggcccccaaagttcagcgcgctgttctaccgccggcgagagccaacaaacctatcccagcctacactccggcgggtaacccagcccccgctgcgcgttcgacctctgcgtcgcgcgcctcgtcgccggccgcccaagccgcctcagctcgagcaccgaccgccagctcgtcctctcgtcggcgtcgagaggccaagcgacgtgcggtatttcaagcaagaggccgcttcctccgaccgaagccggacaaaccaggccgggcagcgccttggtcgcagggcggaacagcaaaaggcccttgcctgcccctcgtctaggacggtcaaagaacgctaactcactcatcagcgcgtctgattcgctcaccggtgtcaacaaagcaccatcttccgctgctaggcctgcccaaaagacgccgaccctccaggaggcaatccagctctcgatcgacctccccgcagcgctctgcgatgtcgagccgcagcccaaggccggcaagactcacgtcaaacgggcactgaatatcctcgagaagcttgagggggtcgaggaaattctttggaagcggctgtgtggagagagccggagcgcaagcgtcgaggtctaggatgcgcatgctgcccctttgtttcggatcgaggtccccttctcgagattgcgtctcttcgggcccttgacagctattctcaagtcttactggccgcttgcttagcttttctcttcttttgtgagcttgagcagtgagagggcgtcctgacaggcccaaggcaggcggctgcatacgctcaacgcgcagcgcctccctcggacaccctcaacgttcatctcggcctttctttgaccgctcctcccgggtgaacaacgtcagctcgatgtctgttgaatttctcttgatttatactgcgctgtaatggtcaaggccttggccgactgatgtcctggctgacgccgcggtgcgctcaggtgacaagagcgagtcgactggtccttttccgcccctcttgccatacaagctcatccaccaagcaactcttctgtgcgtccttcgatcttgaacggccctttttcagtggaacgctcggggaccagcctgatgctttgtctcacgatcgtgcaggcagccctccctttcgtcctcgcttgcgccgccaagttcgaccactccctcgaccggccatcccctcacgctccgatgccgcccgccagcagctccaagcgggataacgctaagaaccttgtccttgaagacaccgaatcagagcacgaccctgttgacgacccggagccgccaccggccgcccgcagcccctcttctgcctccacctttgcggccgcccccgccagagccagcgatccgactccaaccctggccgacgccgtccagcgctcgctcgacctgacgacggcgctctgcacgatcgacaccaactcggacgctgggaaggccaaggttgagcgcgcgctggaagcactcaggaatgtccgggggctggaggggatgttgcgcgagcggggtaagtgaggcaatcgtgcgcgtaagtgcgtcgggggtgacgagatctctatgctctccttgcagagctgcaggcggaggtgacagcagtacaagcatcggcatcgtgtgcagacatggtccgggtgggagggtcgtgaagggcagaaagggtacaggcgcgttgatcaggcgccgaggcaagacagcgacgtcgctcaaatcttgtagacgatgctggaggagagcaaaggcgccagtcagcacccgccggatagagagcaagcggagcaggaaaggaggagacgcactcgcccgagaacatgaccgagttctcttgcgccatccggtcgatcatcgcccgggcctcggccgtgccgaagagctcgcgcgcgggcaggccgccgttgatctctggcatgaggtcgtcgaactggataaagtcctcctcggcatactggttcgagaaaaggtcgccgagccgctggcggaagaggttgagcctgcgagggaggttgtgggtcagcgtccgtcggcagcctgcagggatgtgcaagagcgagtgggtacgtgccgttccggggcgacgacgccctgcgaaggttccggctcgtcggcgccggctgacggcggcaggtcggcgtcgacgcccatcgcctggtcgtcgtcggcggcgtgagcctcgcgcgcagcctcctcgtcggcctccatcagcaggtcgtcgacgttgatctcttcttcgtcgtcgtcggcgggcgtgccgcccttcttctgcggcgaggccgtcccccggcgtggccgaccgtttgccggcgccgacgagcctgctggcattgccatccgcttggcctttgccgccgccgactcggcttcggcctcctcctcctcctcgggcacgtccgagtcggcgtccgagtcgtcgtcgtcgcctccaccgccggtggccgtacccttgttgagcttgcgcttcttgcgccgctcgggcttcatcacctccttgaagagcgcgaagcggaggagctcctcggccgccatcgcgtcggactcgtcgaccttttgcgacagcctcgccttggcatgcgcggtcgagagtcggatgagcgtctcgagcgtacgggccgtcaggggcgacgttcgcttcgtgttgctcgcgaggtcgtcattgcggagcgaggcgtagaccgagacaatgtagtcggccgcgcccttggtgagcaccggcaagatccggttcttcgcgtactggatgtactttttaatgaacgggatcgagaggacctcctttttcttattggcaccgcgaccggacgacgtcgtgacgccgccgtggagcagtgcattgtacttctcaaagacgggcgtctcgagccggagctcttcggtgtcgccgccgacgtcgaggttctgctcaagattgtcctgggccggcgtgccctcctcgacgcccggctggaggtagcggtgcatgcgcaggacgtgctcagagatcatccggtcgcgctgctcgtcgacgtcatctgtgacgacaaagagcaggtcgaaacgcgagaggagcgagtcgggcagggcaatgttgcgatgcgggtccttgtggacgtcgtactagagcgtgaaaagtggagggaggttagcctgacaggcctcaccgctcgagttggcagcaagacggcccgcacctggccgtagatcgggttggcggcggcgacaacactgcagcgggcgttgagcgacgtgtggatgccagcctttgcgatcgtcaccgtctgctgctccatgacctcgtggatcgcgacccggtcgacgtccgacatcttgtcaaactcgtcgatgcagacgacgccccggtcggcgaggaccatcgcgcccgcctcgagtcggcgctcaccagtgtccttgtcggtcgtgacggctgcggtgagaccgacgccggacgagccgcggccggtcgtcgcgatcgcgagcggggccgtgttgaggacgaagcgaagcatttgcgacttggccgtcgacgggtcgccgaccatgaggatgttgatgtcgccacggatgtgggtcccgttcgcgaggttcttctccatcccgccgagcaggaggagcagaatcgacttcttgatgtggtcgtggccatagatcgagggcgcgagcgactgcgacagcagctcaaagatgttgcgccgcttcgagagcttattgatctgccggatgtccgagtcggtgatgggcgtctgggcgatgccgccgcccgacttggacgagagcaggatcgagttgttggcgaggaggtgcgtactatagggggtgacgactttcagcgccgagcttttcgaccatcgctcaagaattagaattggacgcacgcaaaacctctgcttccggctccgccgcccgagctcttccaaatgccgacgagctggatgcggtctccgggcttgcaccggtcgaccatgtcgtcgcccatgacgacctcgacgctccgcggcagctggcccgccggcgcccgctcgggcatctcctgaatcgagatggtctgatggtcgcggaacgtcgacaggccgtactccatagtgacctcgtggccgtcgccgtcgtcgcgcgggatcgtcgtcgacgacgcctggccctggggcgcgcccggcgtcgtcgagtcgtggtacgagcgcgagtggaagttattggtctcctcgcagaagtggatcgaccgcagcatctttggccggacgagcgagcctggcagggtgtggaagtaggtcagcgaaggtcggccgggggcgagagctgccactggcctgggactcacagcgcgtgacgataccctcgagactgatcatcttgccgagctgcgcactccgcaatgtccttgggttgacatggttctctccaaagctgcctcggaaaccaacatagactgccgagaaagaagcagatgcgagaggtcagcttggcgctgtccgtctgatcggagcgtcgagccgacgcacactgcttgttcgagatgtcgtccttgacggggtcgtggacagcctcgaccagcgaggtgagggcgaggtcaaacgcgggtgagaagaaggtcggctgcagcagaagactggaaacgagcaggtcggtcgagagagctcatcagcaccgcgccgcttgctctgagctcaggcatcagcacgcacccgtcggcgtactcgcggttgtaatcgcgcaggtcgtcgaggttgacaatcaggcggacctcctccttgcgcagcatcttcagcacctcctccctatagttgtagttggggttctggcgtagctcaagagcatttgctagggtcagccctcacacaccttgacgaccggcgggctcgagctcgtcacggcgcacctcatcctcgagaaactcctggaagacgcgaatccggtccttggccaggtcatcttgcagctgttaagagatgagatggcgatggcgaaagggtcagctgttgagccaggctgaaggggcgactgtgcgcgagctgccgtcggtcgacaggacgcacgacggggaggtcgagagcgggctctgcaggcgtgcgatatacgagtcagtctgagctcgcagctgacatctcctacaccagatcagacatacgggccatcctgaagaggtgaacgagagacgggacggaaaggctgatggggagcgcagacgggcgacgggctgttgaaggaaactccgaacactctcgccctgcctgcgctgccgccgtgcggccaagctacgcgtctcgtcgcgtcgccggctcaaatgaactcacttgcgcaaatccgccggacgctcgatcagacccgctcaggtcactcagaaagtcgggcgtcaaagtggtttgtgaatacagtgggagagaaagagaaagtttctagccagatgagtgtaagaggatgaaaatatatgtaaggtttcctaagcaacgacctttgcaaccttggcggccgaacgctctgaagcgttgcggatcgcccacgtgagctcgtacgtcttggccgcgtccaggtaggacgacaggacgtgcggctcgggcccgccctcgatctaccgtcgccgagaggaacgagacgcgtcagtcggtaagctcgctcagcgagggcgtctcttccaagggtttcaaagggaggacccacgcagtcgatccaattcgagacctcggagaagaaggggtcgtcgttctcggtccccttgtggacctcctcgtgatcgtctcccggccggcggacgagcagcgtcgggttgttatacgggtcctggagccggagctggtagccgtcggcgtaaacctcaaactcgcacgagtaggcctggaggacgaacgacgggaatcagccgctgtcgatgagcgcgacagagggcgagacgacaaacgcacctggccctggagggcgacggcgtgagtgaactggccgacggcgccgttctcgtacttcctggaacagatcaagccagtcggggatcagtcaaggcggacgacgctttcggcatgtgcgagcgcacgcaccaagtggccgtcgtcacacgggggatgcggtcgtcctccggaatcttcgactcgtcgatcgagatcttggagagcttgcccggcttctcgttgtgctcgaccgagtgggcgctgttgtagataacattaggtcagcgaggcacatcaccaggggagaaagaccgatgacgcacaagacggtcgagatgtcgacgtcgccgccaaagtagcgcgaaaggtcgcagaagtgcgtgccctgctcgatgacggggcccatcgagatcgacttggtccaccagtcctagcaaaagaacaagagatcgaggttcagcgagcgctcaaaacgagagtcaagaagtgaggcgcaccggcttagcgatcgcctcgtaggcgcagacatagcgagcgacggtcgccatgaccgtcaggttgttgtcgtggaggatcttcttcatctgctggacgcaagagaggtagcggagcatgtagccgaccgagacaacgttgccccggtccgtcaggatcttcgcaatcttcatcgcgccgtcaatcgactgttggtagggctggccgctcgcgaccggcttctccatgaacctggaagcgggggacgcgtggagcggtcagtcagagagagaggagaggacgcgacggtcggacggacatggcgacgtcagggaagtgcttgagcagctggagctcgaggtcacggggcggcgtcgggccaccgcggaagaagggcggcgagccgacgatggcggcgctggagaagcggcagaggcagtgatcagtctcgggcaaggatcactgtcgagcttgtgtgagacgcactggggctggatgaccgagccgccctcgacggcccgggcatactcggcaacgtccttgtagaccatcgtgtccttgtaggctgagacgacgaatgagtcgcgcttcgccgcgagcgccgcgttggcccgctcggccgaagggtcaatcagggcgacgaccttgaggcgcgggccgagcttgtgctccagccggaacgagtggttccacggcccttcgtccgagccgaacatgactttgggcgggtggtgcagggtgggggaataggggaagtcagcggatccgacgtttcggcgagttgtcagagccggaaggaccgccggttcggccaaacgggctacgcactgttgccggcgccgatcatgatcaggttgaagtcggcgcccggagcagggtgagggtggctagtaacgtcaagcgaagtcgagtcagctcgaaagatcttgctgctacagggctgctgcatcgctgcctgagccttcaagctcgagcgagctcctagcctgggcgcagacatgggaagcatccgactgtgaacgcacaggtgcatcggcctgatctggtccgggtcgatcgagttctccggatcgttcggcgccgtctcctcgtgcgagcgggcgagcgagcgcgagaagcgccggagaccgctgctggacgaggcgaaggcggcagaggtcgacgacgcgcgcgggctgaaggcggcggcggcggttgagatggacgagaagcgcgcggaggccgacgtcgaccggaggacggcctgggaccgaccggcggcggcgcggagtgtaggttgggtgagcagagacctggcgagcatcttagggtaacaaggaaggaaggagaggatggacgtttgacgtttgcggaggaactggtcgagagggtttcttcggcggcagccgcactgggggcgatgcgcagcagacccgacgacggaccgcgtcattctgcggcagttgactttcacgacgcggccccggccggtgtcccccccttttttccccccttcgcttgcttcgaacgctcgcgctctcgtacggccgggtggggcaggcaacgacgtgagcgggacgcatgacgaaagcgctttcgaggttgtgtcaagacgaggggggcagcatgcatgctacattgacccgccgccgagctcggtcgttggtcgtcggtcggcaagcaggaggcgctatcacagagaatggacgctggctgagcgcgccaaaggggcttcttgctgacgtttgtgaagccgtgcaggctgctaacggtcgcaaccgtctaacaatgattgccgcgacagcacggctttcgtggcaggaagcagcgcgaccgagcgttgagtgagtgcccttgggccgcgttcgagcacgaggcgagcaaaagtgcgtggcgatcaggccagcttctggccagaagggttgtcaggccttacaaagccgttcagggccgcagtatccgtcggtctgcaaaccgcgtcgcgtcggcctctcgaagttagcaagcgcggacgcaagctacgacgccggccgtttcgagatctggacggtcgtcggcgcgggactcgccgcagacgacgtcttgccggatccccttccaggcccaccgacggcagtgccggctggctgctgctgcttcttcggcctggtcgcgttcggacgcggttggtcgagtggccgagtaacagccgctgcttcgagtcgtcggtctggcgtgggcttgggaggaacgacgacaggtctagcagcagcgacagcagccgctggccgtcggaggagcgttgtcgggactgacttggccggctcgatcaccgccgctgccgctaaaagagaggacgttggcgccggcggtttccgtaggatctggatgcgcggcggcgccgtcggctcttgagacgctgtcgggcgggccgaagtcttgcgtcctgccgcccgcgacgccgacgaagcgtccgaggtctttgcgatctgtggccggtcggccgttcgagcgccctttggcgccgtcgtcggcaaaggtgctggcttcgctccagtagaagtagcgggcggatgcgtcgggcgctgaaggaggacgagtttcgaccctccgcctcctcccccttctgattgaccgacctcagccttcgcgccccgcagcgttgcgcccgaaggtgcccgactcggcttgaccgtcggccgcttcttggccggcgcggaagacgacggcggcgggtcgggccggccggcggagccgacggcgcttgaggtgggctcgcccggctgagtctctgcgggccggcgctggaggagaacagggacgggcgtcttcgttgtgctctcattctcccatccgagcgccgccgtcgtgtcggccgtctcgcgcatcctcgacccgcctccgccgccggcactgccctccccctccggtgcgatccaaaacacgccctctccccatcccgcccggacgagcgcctcgctcagccgttcccctgtcgctcgctcgcccgccgcttccgcctggccgcttccgtccgttgtaacggtgcggtacgcgtccgtgtcaggccggcccgcggcaggcgtcggcgggctcgagacgagaacctgcgtcggcgttgtattgtccgcgccggaggccgagaggtagaagaggcagatccggagcgacgttttgagccagggcgagctcggctccgcctgaccgtcctctccgtccgtttcgtccgtgtcggtgctgaatcggtcgtcattgccagccgctgtggtttgagccgccgctcgtcgtcgcccgctttgacccttcttcacagtcacagcagcagcggcctccggcggcgaaacgactaacctctgccgctgcccattgccgcctccggcgccaccgaggtgcgcctcgagccaacgggtcgcgtgccgaacggccgtcgcaagctcgctcgagcccttcttgaggtagtcgagtgagcggatgactgcatgcggggtgcagaacgtcatcggcaggagggttggtccgtgcgatcagccgtcgcgcacgctcagagcgcgcgacagacgaccagcggaggacggaccttcagaagggacgacgagcgtcatctccgaggaggacgcgaggccgaacaggcgccggacagcagggagcgcccagaggagggccgaggtgtcgaccacgaggacgtgctgggcgagcagctcgggcgggatcgaactcggcgccggtggcggtgctgcgtgcgactctgagctggcgacaggcaggcaggcagatcagaacgtggaagcgttcagcagcggtgtcagcccggtcaggccggcatgccgagggaggtgacgaggagcgtacgacgatccgtgctgagcgtgcttcctcgccggcggccctaacccgctcgcccgaccgccagcgagctcgagcccgtcgacgtcggcctgcaagcgctggatctcgtcggcgagccgagcggcggcgagcgacctgcctgctgctgctgctggcggaggaggcggcggcgaaggcatgctgaaggtgatggccgtcggcgggctggctgcgggccgaagctcgctgctgtcatgctcgaccgacccgtccctcccggctgatggcagttgccggctccggtcttcgtcggcaaggcaaggccaaggcaagtagaccgtcaacgacgacgacgaaggagtcactgcccaacgcacgcgcgcccatcgccctctgccatcccactcgactcgtcccaccccgcccggcccgctcgtcccatcttcgcgcccaaccgagggagccccgccccgccgttttcaaccagccagccagcagcaacaaggacgcgccgccgccatgctcctgctttccaccaccaccaccatccgcacctcgtctcgtctgcccctgctcgcccgctcgctcgctatggtccgtccctgacccgtgctgcccccggccacgctcccgcaagctgaccaagcgcgtcctctccccaccctctttaccaccacctctccgaccagtccgccttcaccccgcaagagatcttcatcgcctcggccgcccggacgccgattggcaacctttcgggcaacctcaagtcgctctcggccgtccagctcggaacagtcgccgtcaaggcggccatcgagcgctcgggcgtcgccgccgacaaggtcgaggaggtttacatgggccacgtacgtccgcctttacgcgctcgctcctttggtccattgcctttgggctgccgggtggctgttaggaggcgttcttcgtcgccgccgggaggtcgtccgtcctgaagaggctgtcgtgtcaaccgctcgaacatcgtccgcgggctgtggccgctgctcagcctttaggcctgctcgggctggtcgacgcgccgacgacgtccctgtgccctcctttcaccgctgccagacgatctatccccctcgccttcatcgcgcctggcgctaaccctcctctcgccccctacaggtcatccaagccggcgccggccaatcgcccgcgcgtcaggtcctgctcgcctcgggcatcccccagtcggccgacgcgacgacgatcaacaaggtctgcgcctcgggtctcaaggccatcacgctcgcgagccagggcatgatgctcggcggctttggcggcagccagaagcgctcagtcgtcgttgctggcggcatggagtcgatgtcgaacggcccgtgcgtccacctctgcccgagcgagtcgaatgagggactagaagctgacgcgcgcaatttaacccctctgccgccagcttcctcatcccccggacgaacccggcctttggcggcttcaagtcgaacgactctgtccaggtcgacggcctctgggacgtaacgcacaacttcccgatgggcaactgcgccgagcacgttgccaagcagcacgctatcacgcgcgaggaccaggacgcgcacgcgctcgagtcgtaccgccgggcagcggccgcctgggccgagggcaagtttgacgccgagattgcagaggtgacgctcaagcaccccaagggcgacgtcgtcgtccgcgaggacgaggagttcaagaaggtcctgccggcaaaggtgccctcgctcaagcccgtctttatgaaggccgagcagggcgggactgtcacgcccgcgaacgcctcgggcatccaggacggcgcgtcggccgtcgtcctcatgacgggcgaggccgtcgccgcccatggcgtccagccgctcgcaaagatcctcggctgggcggacgctgcgattgacccgatcgacttcccgatcgcgccgacggtcgcgatcccgctcgcgctcaagaacgccggcatcacggccgacgaggtcgacctgtacgagctcaacgaggccttttcggtcgtcgtctgcgccgccgagaagatctgcgggatcgaccggagcaaaatcaacgtcaacggcggcgccgtcgcgctcggccacccgatcggctcgtctggctcgcgcatcgtcgtcacgctcgtccatgcgctcaagccgggacagatcggcgtcgctgccatctgcaacggcggtggtgccgcgacggccctcgtcgtcaagcggctctaaagccagcgcgcccgactttgctacctccctctcacctctctccctctcttaggtgctaggcccggccgttgctgaggcccaaggcagatcccatgcgcatgctcactgttttcgcacgtcgcagggtggaggggcacaatcatcaaagagcgctagagcgccgacgtcttggtgcagacgagcaacgtccgcgtgctcatgcaagagagggaagaatgcaagagagggaagagggagccgagatgagcggctcggccgctcttaccgctgacgagcttgaacctgaacctgaacgaggtggacgggcgcaggcagagatcgtcgagcacggtcatcatagaggctgctaagggatacataaggaggagacaagccgaagcggaggcagcgggcagtctacttgccgatcgcatgcttgagcttgtcaatgatgccctccttgtgctcgggctcgccggtcgtccggtgagcgttgctatcgtgcacattgtgagtctcgtggctgcgcgcaaggtcccgctctcctccagcaattccagcaccggtcgcgccccgcgagccgatgtgacccggggcatccgaccgggtgtcgtgcccggcgccgtgcgatccagcggtcgcgagtccagcctccgggtgagcgttgtggacgccggcatgcgacgtcttctggctgtcgacgcccgtcttgccggccggcgcaaaagtgtggccctcggccgcgagcccgggctcgtgcgacgcaaggttcttgcgctggtccttcgggaggtcgggcaggttgacgccgtcctcggcggcgacgtcgtgcttgccgtaggtcgttccgtggaccatcgccggggtcgaggtgtggtctgcgaaagaaagagcgggtcagcgactccgagctgaacgtgctgcagctcctcggcacgcacccttggtcatgtcaaaggccgagaagatgcccttcttgtgctcgctcgtgtcgcgctcgacgctgttgtgggcctttgtcgaaggaacgccctcgcccgcgcccgagcggccaaaggtgttgctgcccgagtcgaggcccttgtggtcgttgtggccgagcttcgagtggtggtcaccgtgatcgtggtgagcaccgacggcagttgcgccgacaccggcagcaccggcgagagggacggccggcgagccgtgcgagtggtggtcgccctggttagagccgaggttgttgccgtgcgagccgtgaccgaggccggcgccgccgggaagaacgtgtccggcgccggcagccgtcgtcgtcgaggtcgtgtggccagcgccggtgtgcgagccggtgttgatgggccggccgagggtgtctgcagggaaggggaggagcagaaggtcagccggaacctgctgcgcgggcgaagacgcttctgcgaaaaggaacgaacggctgtcgagctggacgtcgttgtcgtcccgtcccgagcacattgcgtcgtggacgtgaccggcaagaccgtgggcgatccccgaattgttgtgcgagtcgttagagtgactggcaagaggagacgaggctggcgtcgtcagctacaggcagggcgagccagcagcaactcgcagcgaaaagaaaggacagacgtgttcatgattgtgtgatggttgtgtgatggtgggagagggcgggagagaatgggaagagatgagctaccttataagagagggcgggctcctcagcagagggccatgtcatttgcggggtcaccggcaaggagggccacgtcaggggcctcccgccacagcgagcttgcctccctgcggccggcgtctgtcctctctgcggcatgtgcgccgcgcgctgagcgagagtcggcaggcttcgatgtggagcgggacggagtgacgcaggtcgccctgaagacgattcgaataaccctcgcgagccgagagcctgggccaacgcagggagacaagatgacgggaccaaccctgccgccgccgaggcgacgcaggaccccacattgctcggtgggtcgcagtgagagcgggtcgagggcgtcgagcgctcagtcgctactataagagacgctctttctattattccctctcaagtcaggtcttcgctgctgcaggggggtgagcgaagagtggagcgacaggacgacgtctgaaattggcggtcgcgtggaccggcttctggcttccggggcggaaagaccggttgccagggaccggtcgctagcgacgtacgcacggcctcgcagcactgacgaggtccgtctgatcacatagcgcgcgagcccttggactggcatttgagagagcgcttgcacggcacagccgcgcctgttcgtcctgcacacgacctccatcaactgctgtacgtgctcgccagccgtctccggagatgctcgcccgctgtcaagacctcgatctcgccgcccgggccgaggaggttcttccgccggagaacctcgcgccactggtcggggctgagctggccggtcgacgtcgctggtaggcccgagagcgagacttggtctgccggctggcagaagtaggcgatcgagtctgcgagacagagggaggagcaggaggcggttggtcggttcagcgcaaaatcgggaaacgactgcagccagtcgagacgcacatctccgaggagacgactcggtcggtagtggtacgcgatgcagggtcgagcggaagagaccggtcgtccaagcctcctggagttgaacaaatcagcgcatgtcagcgagccgaaatctcagatgcgcgcagagcgacgtcgactgcagcgcaacaggggacggaccatcgcgtcgccgatgttgacgacgatggcgccgttgactatcggcgccgcgacccactctccacccgcgacgtcggtgctgagcgcgtcctgcctcctcggcactaacacctcgagcccgccgacgtccttctggaacaggagcgtcaggctgccatagtccgagtgagcgcccgttcggacgtccttctcgtcggcgcttggctcgaagggcgggtagtggagcagtcggagccggtccagcgtcgctggatgcaagggcgtgaagaagtcggcggagaggttgagcgagagcgcaaagtagccgaggaggcggagcgatagggcgtgacattgctgcgagcagagatcagcgcatagtcagcagagagagcaaccgtttggttcggatgagcggtagcgcacctggaagaagctagcgagggccgcctcgcgtgcggcgagcgtcggcggcagcgcctgcgaggccgtgccgtccggcccaaagcgctcgaggtagaagctctcgtgcaggtcacccttcgtcgccttgcctgcgaccgggttcagcgtctcctgcctgagcgtcgtccactgcgtccgggtaacgacggagcggaggtcagcctgcaagatcacggcgcagcgtgttcgggagcgacgcacgccgacgttggtccctttcgcccggacgcgctccttctcatctgccgactcatcctcgaagaaggcacgcgagctcgcgaaggcgccgtcgatgtcggtctgggcgatgccgtgctctgtcaggtagaggaagccgtgggttcggcaggcggccgagatggcctgcgcgagcgccgccggcgacgacgcgtcggcgagcgagatcaagggaattgacatgagccgtgacctcgcaagctggcgtacgatctctaagagtgtctaggaagtgcttccaggtccgggctaggctggcagaggaggagcctcgagacgggcggtcatggccagagggaggcaggggaagactgcgggctgggcgagtacttcgaacgtcgcgctgcctgccgagccggctcacctcgaacatcgtccctctccttcgtcaccttcgctcaggatgtcgcacaaccagccactcctgtcgtctcagatcgagcccgactccaactcgccgccgtcatcgcccttcccgtctggcaacatcggaggcggcggagctccccggccagcagcgcccgcgacaagcggcggctcaggcctgccaacacctgtcacccaggccaacggcaaccaggccggacaggacgacggcgtggtcgccatgctgaagcggagctcgcatcctgtgcgtccacttactcgggccgaggtcgtgggattcgttggaggacggtcgggttgcaagatggggtcgaacaggcgctgcgtctgtgcttctcggccggccagtcgctcggtctggccttcagctcgccagctggtcctcaacccgctcggccgcagggcatgcaggtgacgctccgttgtgctgcgacatgcgctctggtagccccgttggcgtagctgttgggcagccgggcaaccgcctactcgacgggccgggagcagctcgcgtcttggcctcgcacgcgctgcagcaccgtgctgacctcgtctctactctctctgcagatggtgctcatctcgctctacctgttccgatcgctcgccattgccgtctacgtcctcatgggcctcttcacatcaaactacatcctttcgatcgtcatcgtcgtcgtcctcctgtcgatggacttctggaacacgcgaaacgtctgcggccgcacgctcgtcggccttcgctactggaaccaggtcgacgaggacggcgagagcgcctgggtcttcgagtcacgcgacgtacgttcgccgacctgccctagttagctgcggtgtggctcgacgagactaacctgtttggaaccgcctccgcagccgtcgcttccggccaacccggtcgactcgaaactcttctggacagcgctctacgcataccctgtcggatgggccgtcctcttctttgtctccttgctgaagttcagcgtctcgtgcgtcggcccttgcatcctgccgccttccgttgcagtttcctaaccgcgagcctctcaccgtttcgcttcgcagttacctgcccatcgtcgccctggcccttgtcttcaacctctcaaacgtcctcggtttcacatacgccgatcgggacgccaagcagcgctgggccaactctgcgatgggctcatcgttcggcctcggcggcctcggaggcctcggcggccagctcgtcggcggcgcgatgcgcagcgggctcggacgggtgttcggccggtagcgctggtcggtctgaagcccaatccgcggagagaagataatgataccctttcgtgctgcgctcctgcttgcaatgggcgagatggacgtgcaggagcctagaaggaggacgatggacgtgcaggagcctagaaggaggacgtcggcatcaagagcactcctgagcgacctcattacagcttctacccgctcccgtttggtcgtcagaggggcaattgatacagtggtggtctcaaacgacagcgagagtgcgtgtatgagatgtgggcggacgggtctagagacggtggcgctgaaggcagtgtccggaggggaggctgaagaacagttcgtggagtttgggcaggaaggagggcgaagccagaggcagctagggccacgctcagtaggcggccgcaccgggctgacgccgtttgaacttggaccgccagccctgctggacgtagggcgcgccggcgaccggctgctgctgggcgtagggcgagttggtcatgggctgctgctggtcgtacaagtcgccgttccggaccgccgaccgctcgcgacgccgattgcggaacgagccgcacatgccgcagcagctcgcaagggtcgtgaggctggtgtgaggggagaaggggagaccaagtcagcagctgcgagagaagggcaaacgacttcgactgatggacgcacaggaggacgatagcggccgccaagtggagccacagagcgttaccgaacgagccgcgtacctcgtcgtcggtgtaatctgcgaggcggttccgggcgatcgaaaaggcgacgatctcgatgatccaggcggcctgtggtgcgatggctgtcagctgatggcggccgccggagagcgaaagtggagacgaggcctgacccaggtaacgacgagggcaatcagcgcccagaggaatgccatgatctcccagaaccgcgagttgcagaggagcgagaacaggctcgtgaggaagaccatgaaggcgaggccgcatgctgttgcgatgggggtccgtcagcagtgcgatccgtcgcgtcggcgggcacgtggaggaacgcacaaatcggcacgaggacgagcaccttggttagggtcgagaaaatccggtcatagttctcgctgatggaaacggtaacgccaaggacggtcgggttgaaggtgtatccgagctgcctgggcgagcattggcccgcaaatgcagtgttgaagatggacgtgctggcaaacgtgagaccgagaggttagcaaaggtagcctggctgagctcgacaaagccgatgtcaccagcgaaggcaggaggcagttgggcgacttcgcgctcaagcatgcctgactgcgctgcaactctcgggaccagcgaagctcacctgacaccgatgttcgaaaggcagtagccgaagatgccgaagcgggctgatccgttgacagatgctgtcgcaacggtcgagacgacatcggcccgaaggaagaagactggtagaggcatcggcaggaggcgggtcagcgcgactgcggcgcctgaaacaccggcggcagacgttcaacaggcggccgaacgcactcgacttgatgatgggtgtgctgagcgagcacaggaggagcagcacgaaggctgcgagcgagaagaagacactgggagcggctggagagaccatcgtcgacgggcggatgggtctcgggttcggagggaaggcgaggtgggctgggccgggtgggatctgctgcggaggcgcaaggtgaggcgggggtgtcagcgtcggcttctcgcgctggatgcgcacgctcgactacgactgactgactggtgggatgggaagtcagtcagtcgggatggatcgtggttggaaggtcgagaagggaaaggctgggtgacaggaggaggccagggcgcgacctaagagcgatccagggaaaggggccggtgacgtaccccggcgccgagcccgcagcgaagtctctttgggcaaacaggccggtcaccctcccagcacgccccacgtggtactgcgggtggcggacgagcgcaaggcagacgggctgtgcgaacgaacatctgctagagccatcgtagctaattcaaggtcgagggaaaggaaacaagtagggccgaccgaggctgatcctggtcgacgaggcgccgggcgacgggctccaccctctgccgagacagatgaagccgtcgaaggccgagactgaactgcgagggcgcggcagttatcgtccctcgagcgtcgcaagcgtcgagcaaaggaaagcggaggaaaaggagaacgacggagagaacagcgacgctacgagtagaagtcgtcgctcgcgagactagggctgcgcgacttgtcggatatgggcgccgctgcgctgctgttctggacgacagcggcagaatctgcggtcggcgtgcgcgaccggatcgtcgcgtctgggtcggcctggtcgtcgtcgctctggtggccgggcgagagtgcgttcgacagctcgacatctggctgaggcgacggcgacgggtcgtcgaccatctggcagatcgagcgcgtcaggcagtcagcatctagggttgaagggcagcaaccgagagttgaggcgcaccacgtcctcctcctcctcctcctcctccttctcctgctctttgtcgtcctctgactctggctcggcgtcatgcgcgcggatgcgaatgctccgtcgcttgccctgccgtcctcctcgcccagccgagcccttgacgaccttcttggctcgctttccagactgggcgccttcgccgtcggcctttgatgtcgacgccctgcgcttgcggccgagaatctggtcgatgcgatcctcggcctcgccgggctcgctcggcgtccggtgcgtgctcggcgtgctcggcagatccgacagcgggtccgagagaccgacggctgcctgctggctgaacgagagcggcggcgttgcccggcggagcgacgtctgagactgccgggtcaaggcgagcgaggctctaaggaagaggaggaggcaccaaagcgcgcagcatcaaaggggttagcgtcgcttgcccctccccatctcgacgagcagcaggccgcacccgaagccaaagaggtcattctcgagcgtgacgggcccgattttcggcgtccgctgacgatcattgccgccgcccccgatgtcgagcagcctggccgacgacgatgggaccggcgaagggtcgtcgcgccgcgagccgtcccgcctggtgcgctgcggtctgctggccttgatcgccgtccggactgagctggcctggctgctgctggcccgcttgcgtccgcgggctgcttggcctcttgtcgaactcagcgcagggctagacttggtgatcgggacgtagtccttggccttaggcttgagctcagccgtcgttgagcggtcggtcgaaggcggcgcagcgacgcccgctggcgatggcgaggcgagccgagacgaggctgtgttggtcttgcttgcgagaggctggcggcgaaggccggtgccgccttcagaggccagcgacggatgcggtgacgagtgtaggggcacgatgggcgggcggcgatgggagcaagagtggccgttgcaggccagccgccaagcagcggctatgacagtcgacagcctgtcgtcggtggttggggggggggggagcgggcgccggttagacatctcggcgggctgtttgctggccggcatgacaggacgtactggcggctccagcgagacacatcgagatcgtgcccaggatatcggtgctcgagttccacagcgggtccccttgaagcgagagcagggacggagacgaggcaaaggcgctgtcagcgagcacctcaagcggcagaccgtccgaaagccgggggcacagcgcgaggaggtgctgaaaggtatgagcagactgacattgtgggaggtgaaaagggaccagctgggcgccctcacgagggtcggacgagtgctgcaagtcgaaagccgagcaggagcgtctgatcagcttcgcgagacggagcaggcaccgaacgggtatcgacgggtggcgacgcgacaggcaaagtgacgcacgagaagcgggatctggacaggcatttgcagagattgaagcgggctagtaggagagatgattgtgagggtcctggctcgaggctggtcgcgaaggtgacggccagaatgcaggacagggatgcggtcggaggggcggccgaggcgagcccgctgcgcagcgggcctttgcgccggcgaggacgaggaagcaggttacagagcatgcctctcccttgaagagactcacgagcaggacgtcagaccatgcaatgagtccaggcatgccctgtctgctgcacaaactgttgaaagggagcctctgtcgaggccctttcccggcgacgcctctgagctgcagcctcttccgcgccgccgcccgtcccgacctccttcttttcgacgacgcgcaggcactttccgaacgacgacgccgactctctccctcaagccctctcacgactctgcaagatggacagcccgccgccgccccagtcgccgccggcagtagccgctcccgtcgtgccagtcgtaccgccgacaccggtcgcccctgccgccgccgccactgcagctgccgtcgctccggaggcagccgccgccgccgcttccgccgctgctggtgctgcaccgaaggcaggagctgctgccgtcaagccgccaccgctcgtgccgtacacgggcatccccaacttttcgctgccaaagaagcttccgcaccgcaattggttcatctttgccgccgccgtcgccgtgccaacttatgtctggtacgccgaccggcaggaggccgcccggctcaaggaggcctacctcgctcgcgtccgggcgctcggcgaggtcaagatgaacacctcgctcgacacggtccggacggcccaggtcttttgctcgcgcttcccgggcgaggacggcgggtttgcgagcgactggttcaagaagtatctcaaggtgcgtctcgaaacctggcgagggattcggcccagaggcacacgactgaccaccccgagagttgctccctgctagccctacctcgtcgcggccgccgtcgactacacgatgccttctgtgccgcagtacacgtcgcttagcgtcctgctcgccgacaagatccacctgctccggcaggcggcggccgacccgtcgtcggtgccgcctccgatcccgggcaagctctcgcccgtcgacgagggccggcgcgacgcccagggcggcgtcatcctcgtcggccggcagagtctcaaggagtacatggagggtctccgtcggggctggaccgaggaccgggccgagccctgggagagcaagctcgacgacgccgtctttgaggacccgaggctgccgccgctcgccgagggcgagacgcgcgcgccggtcgggccaaagcggtcggcaccgatcaacctcttcccgttgacgacgccgccccctcgggcgcctgtcgacgagactgcgccggcgcctccggccgcgctgcccgcaccaccgtcgcccctcccgccgctgccgtcggtcctcctcgtcccttaccagcccaacatgggcttcaccggcgttccccgctcggtctggggctttttcaacacggccgctcacacgcgcgtcggtggcgaggccgcgatggccttcatcctgaacgagccggtcgtcttcgccgggccaaccgagccatttgtccccgggggcgaggcgctcaagcccgacggccagggcggcgacgtcgaccggctgatggacgacgagtactttatcccctcgagcttcaacaagctgccaaaggaggtcgacgacgccatggtcacctactacaaggggctcgagaagaaggtcaagacggcgtgggagatccagcaaggacggggtgcgtccgcctctgactcgaccctgatcccgccgtgagctgacgcaattcccccttcttctcgacagaactcaccgacaacgagcaaaagtacccgccgccgacgctcaaggacctccgcgaggagcgtctcaaaaaggagcgccgggcaaagcagaaccgcgagggctaccgcctcctccgcaagcagagcggcgtcgcctgggacccgagctttgaaaacgcctttggcgtctgggactgggaggtcaaggagtagtccatggccttttgcgaaagaaaaacggaagggttgggggggcaggtgtgtcatgagatcgtgcggtggtgtcgaaaggatcggggaaggcgctcagagcgtgttgagcttctcgagcaagagtttgctgccctttgccttgctcgcctcggcctgcttgcgcgcggccggggtcgaaaacgtcttcttgacctcggccaggagtgcgctctcgcccgctcggagtcgctcaatcagctcgaccataacgaaggcgccgccgccgcaagcaacgtcgacggcggtgccggcgccctcgaccgccttccagaaggcctcggcaaaggcgagcgagtaggcctcgaacccagggacgacgtcgatcgtccttgtcgccatcgagtagtggccagcctgaaagacgagcttgtagagccgggccgcccacgagaggtcaatgacgtgcacggccgggtttgtcgggtcggggtccatcgagaacgactgcttgtacggccggccgagcggagcgacgagcgacgagatcgtcggcatcttgtcggctgcgttaacgagggaagctcggcgggtcagccgtctgcggaggggggcggaacaagagcagcgggcggagaacgcaccatcctcggcgtagaggagcgtctcctgcatcagcaggcacgcgccagcatcgcggatgagcgagccctcgctgtcgccgacaatgacctcgatcagcccggggctgacggccttacggagctcggcctggcgggtcgccgtctcctttttagaggtctttgcccgggcggcgtcgtggaaggcgagcaggttggtcgtcgccggcgtgaagtgccgcttcgtccggggcacgagcaggtagagcgggatccgccggccgagcttcgatacaaagagctcgctgaggttgagctcgccaatgatcgacttgccgacgagcttggtgtcgctggtgagccgagggcaggctgtcagctgaagctctcctgagacgggatcccgctggggacgcactcgatgacgtcgaacatcgtcatgaggaccgtctgggcctcggcgtcctcggccatcttcatcacgtgcggccggaagaccttgacaatctgcttgcggtcctttgcgctcgcctgggcgagcatgtcacgggcaacgaaggcgccgtcgcgtgtgtggacgatctcgggcaggatctcttggatgctatgaagcggaagtaagggcaaaagtcagtcgtccagcagcacgagtagagccgagtgcgagaagacgcacccgttgaagaaggcctcgcgccgcttctcgttgtcgggcagcgaggcgctgatcgtcaggtagtcgcgaaggagccggtggatcatcgagtgctggatcgcgcccttctccgggttgtcaaagatcgtgttgaggtggccgtaggcgacgtcggcgatccgcgcccgacgcgactcgtccatctccgactcgatgaagccttcgatgcccttgccctcgttgctgcgggcggtagtacgcgcgcgtgaattgtcagctaaatgagctgctgtgtcagagcacaccgacgaggtcgacgcactcagaccagaggagcatctccttgccccagaactgccgcatcatcgccgtccgctccttggcggtgcaccagagcgcgtacgcatcctcaagaatgccgctcgcctcgcggtggttgatcagccgcgggacgtgggggatgagctcggggaagatgatggccctcgacgcgggcgagacgcggatgagcttgaggacgaggaactgcatggagggtagctcgtcggtcagcggcggcgcgcaatgaatggcgttttcggttcggtcggtcgcaccttcgagtactttgcctggatcagctcgaggtaccggcccttgagctcggtgccaaccttctcgcgctcgatcttggtgccctgcttgacgatctgcggcgatacgttagttcaggagtcagacgtgcgttaaatcgagcgctgagggagagggcgagcgactgaccgactggacgacgcggcctccgtcgtgcttgttgacgacggccgacatgcggccctcgagcagcttcatgagctcctggagcgcctcgtcccgctccttcttagcaatcgcgccctccttccggttgatcttggcccagagcgccttggactcctggaggacctgcgcgttcggcttgttgttgcgtcgcgcgagccggtcgaccttctgcgcctcgcgggccgcgcgcttctctgcagtgcaaggacaagaggatttttgtcagaccaaggagcttaaggggagcgagtgcaaaggagcagcaggcgcacctgccgggtcgcgagtcggtgcggcagcgccctctgcgccgccgtccatgtcggcgtcgtcgccggcgccgtcctcgacgatctcgtcgtcttcgtcgtcctcgtcaagcgggccgagcgagccctcatcgtcgtcctcccagtcaccgccgtcgagatcggcctcctcctcctcgagcgtcttgcgcgagctcgagctcgtcagcggctgcttgcgcttctcctgggcggccggcggtttggacgacgacgacgacgacggctgcaacgacgacgaggacgaggcctttgacttcttggccggttgggaggacgagccgggcgccgaacgctttggtgcggccatgctgtctagtaaagtgtgggaggagaaaggtgtagagtgctgggagggagtgcgggtcgggctggctgggctgcctgcgcggcgcccattccaagttctcgcgaagcgggcgagcgggcgcgcgcgcgcaagtgcgaccagcaaattgtcgccgcggaggagcgaaaggaggcgcagcgggcccacacccagcggtcgacgctagcgagcctgtttcgacctcgtctgcctctcctccctctcctccctccctctagcctacctcagcgtacacacgatgtccgactcgagcgacgccatctctggtgcggcttgctttcctttgctgcaacattagcaggccgtctttgactgacccctgccccactggcggcccgcccgacagacgcctaccggctcgtccacgccttcctcgaggcgatgaagcacaagaaggcggcagccgcgctcaaaaaggagtgcaaggccatcgccgacctcgacgtggccgctccggccccgctcggcggcaagacgctgctcgagctcgttgagggcgcccgggctgcgtgcgtctcacctgctctcacacttgctcgcgtgcaggcaggctgaccttgaccgtctcgttcttgcctcgatgcagtcctgcgccggcagccgctgccactgctgcagctgctgagtcttcgagcgactcgtcctcttcgtcctcttcctcgtcgtcctcgtccagcagctcgtcgtcctcgtcctcctcttcctccgagtcgtccgactctgaggccgaagccagggccgtcatcaaggctgccgctaagaaggctgcctcgcccgtcaagacgcccactaaggcgcccaagaaggtcgccaagaagacctcgtcgtcctcgagctcgtcctcatcgagcagcagcagcagcagctcgtcgtcgagcgagtccaaggccgaggacaagatggcagccaaggccgtcgcggtcgtcaagaaggctgctagcagtagtagcagctcgtcgtccagcagctcgtcgtccgagtccgaggctgagggtgcgtctactgcagtgaccgacgccgactctcgcccgcgcgcttcggctgaccgtcattcgtcatctctccgccccgcagccccggtcgccacaacctcgacgacgacgaccatcgtccagacgacagtcacctcgacgaagcgcaaggcctcggaagaagcctcgaccgccgccgccgacgccgcgaacgacgccaacgtccaccctgaccgcaagaaggcccgcggcaacgccttcggctcggtttcggcatcggagagcccggcacctgcgactggccacaaaggcgcgcgcaagcctgcgggcgagcgcttcagccggatcaaggacagcgacgtctctttccacgacgaccggctccggtcgaacgctttcgacaccaaggtgcgctcccccccccttgcttggctctttgaagccctcggctgacgtgccttctcccttctgtgccagggcggaactctcggcgactacggcgccaaggcctcggccgacctgatcgtcacgcgcggcgccggcttccgtaaggagaaaaacaagaagaagcgcgggtcgtaccgtggcggcgagattacggtcagtctcacgttccatgtactggccgctaggccttgtcgactgacctgctcgccctccgaccctcggctcagatggagagccactcgatcaaattttaaggccggcgcgccgctcgtactgctctcttatggtcatctcattggattggcctccctctgcgtccctcgtcagctgtctgcttctcgtccctctgcgtgtcgcgtcgccgttgccgcaaagtccgctctgtgtcggttgccggttgccgtctgacctgctgctggtccttgcctagtcatgtcgaggtccaaactcgctctacgcggtcgtcaagatactcataatcgtcgtcccagtagtcattggcgcgtgtgagctcgcggtgcgtccgtcctagccctttcaccctcggtcaagtagacgctggccgtctagagggcttccacgacagctccttgcccttgcctggcagctctggaaagagttcgggatggaggtctttcggacgctcggcggcgaccaggcgtagcgcgcgcgctaccgatgggtccagatccttgtcactttgctcaagttcggctgattcttcggcgtcggctttacgatgctggtcggttgcgtgtcctccctggcatgtcaagtcgccgggctgacgtgcagctgattgtctgccggcctcccacttcctgatcctcgtgccttcatccttcctcgaccgcgaaataggcggcgggacgaccggatgggctctgacggtagctgccgtgcccgtcagcctcatcatgtctccagaagggagcgtgcgtccttctggtcgcctgactgaaccccttctgcccgcaaattgcgaccaccatcatggccatcaaacgcgagatccgctggctgctcgcggtcgatctgacggtcctgtccgccggcgtcgcgtacctttcttacaagctcgccagtctctggctgccccgcacgcggcgctactttgactcgacccgcaatacgctcgccgtcttttgtgcgtaccctgctgcgcagctgtacgcaacggcgcagctgtacgcaaccgagcccgagcgacggtgtactgacgatcttgccgccccaccaattcatgagtctcgtccttttgtgtgcgacctctgtcgtcggcgtcaaggtcctgctctcctttggacaaggcttgatgtacgcgctcggtcagccctctcgtcacctccacccttcctcaacgtcactcgtgcccctttcgcgaggggcgacgcagaacaaaagaagatctgatgagctgaccgtctcgctgtttcatgccctcggttatcgtcctacccgcgatcaccggaacgccccgctcgtctggccccccgccgctttttacgtcgacgacatcacatcaccgcctctccgccacctgccctccaccgccggcgcctctctctcgcgtgttcccccttcccgcgcgcagagcccaagcggcctgtccacacagcggcgctctcgccctccctcgagggcgagaaggaccggcccccggccgaacgctttgtcatcgacgactagtccgcggtcggcggggaaagccgggacgcccgctggtgcgctccttctcgctcttgctcacccttgttgtagatgaatggttccgtcatggcaggagctcctccccttttgttcacgaagcgcggctggtttgcgggagaaaacagctgactgtcgtctagtcacacattggtgtaaacaactgaacaagggcgcccacagcagcccaatgacatagcgcgagcactatgctcgtccttctgaacttactcttgatcggccgccggcgacgcctgctcaattcttgagtgctcagcaaagccagaactcaaaaaccgcccttgacctcttgaactcaacaaggctcccgacggacattgcgaggataacgccgatctcgccgggatctgaccccttgatctctcttctcgtttgcgcctctcgtcgtcgttttgcgcccgtccgagggctttcggtggcagtagacgggctcggttccggctggggccagcaggcagcaaggccgtggataagagcaaagcaggacgagatgaaagggagcacaaggacagacgccgatggggaccatggctgaagacaatcggcatgcggcggccgtccctcctcccttgtccttttgttctgcgcagctggctgctgcgcgctccggcctcgccggcgaacagcggcgccagcagcccgttggcagagccagcagctgctctcctctcttgcttcgcgctgcttccccttcgtcgcacagtctccgacgacccctccttccccaacgacgggaccagacgacggcttgtcttcccgaagcccgtcgcccccgccgccgcagccaccgtcacgaagctcccgtcgcccgacggcctcgttcgccgcccttctctccgtactctgccgctgtcgccggtggctcgtcagcatgatccctgtcacctcgtcctcctcattgtcctcggcggctgttcacgacggaccgccttcgccagcgaccttgccccgaccgcggcctggcttgtacctctcgccctcgaccgtccgccgcccagcaccgccgtcgctcgccctcgagcccacctctttcgacccgcttgccgaacagagagatctctttgacaggccgcccgccctacccctttcagccaggctcgccagcgaggacgaccacccgacgctcctcgttagtccgtcgacgccgaccttccgcaccggcccgacccgccgaacgtctgacggcatgccgacgacggccgcaacgacgacgacgacgcgccagctctacgcgtcggccgtcccgggcaagccgcctacctcaccaccggcgtcgtcggccttgtcgcccgccatcccgagagcctttgtccggcagaagctccgccagctcgccggcgccttctaccagcggaccgacaatgcagatgtaacgattcgtgcgtctctgtcggcttcttgcgcgcgcagtgatcccagcagagacaagggactgacgcgaagccgccttgtaatcatccgacagtccttcgcctgccgacgagctcggccacgcctggcccgcagccgttgacgccgccactgacggcaccgctgcaccagcatcgccggtgctcggctcccaacacaagcgaaatgtgcatctctgccggagcttccgtcgcgctcaaagccccaccagaatcgctgaccatgacgctcgcaacagcaccgtcctcacgtacaagctccaccgcgagtacctctgcagccagagctcgctcttccggcgcttcctctcgtcctcgctctcgccctcgagtccgccagaggcctcgtcctcgtcgtcccgtcctccctctggcccggcgcaaagccggccgcgggcgcggctcgtcccgagcatgtccagcgacgaccacccttgcctccttctcgacatacccgacgccggcgccttcaacctcgtcctccactggctctactggaacgagttctcggtcgtcgagcgcgcgctcaactccaagacggtcgactggaaggtcctcttcaacacgatcgaggtcggtccccgtctgctcgctgtcgtccttccaaatcccacactgaccaaccttctcttcgccgccggcctcttcagatcctcggtctcgacaaggagatcaagatccattcgagtcgctggtggcgcaagtgggtcaagccgtcggcaggtccgtcgatagccgccctcgcagcaacggcgaccgcggccgccgctgcagcagcaggccacgactcgcccccttcgtccgcctcgtctggcgcatcgacggtgatgggcgcatcagcgagcgacccgccccggccgtcgggctggccgatcccttcgtcgtgcgggccgtcaggccgtcggcctcctcggtcatcgtcctccaccacgtccgagtatcagacgggccatagcgacgacgacgacgacgacccggacgacgacagatcagaacatcgagctgccaaaggccgacctcttccttcgtctactgccgggcccatggacggcgacgacgaggactttgcctcgttcgccgcccgtgtcggacgaatgccgatcgacggcgccgagcgcgtcatgtcaggcctccttgatgcgttcgactccagcgtccaatagagcttcttctttctcatctcggacactctactcggcgtacctgcccttcgtcctccttctcctgtcgccccctcacccccgtgtcttgtaaccctctttcacgttatgccgctatcgtcccggctgtacgccccctcctcctgtctgtgtccttggatcttatgtcgcgccaacgagtcctttcttcaagagtcatcgcatcgtcactctgcgatgacgaggtagctcgaaacgctgtcgggcgtcaggatcccgacgtccgagatgacgagcccgatcgcgtctcggggcgtgtaatcgtagcgagggttgagcgcgagcatctcggccgtcatgcccgtcggctggtctccgccactgctgctgctgcctggtcgctgcgggcccgactcgctcccgacgtcgctgtcgagccgagtcggctttggcctcggtgaggcgagcggcgagggcaggatcgtaaaggacgagagcgggagcgtcggcttgctggacgaggccgacgcgggcgacgcggtcgaggtcgacggcgtcgctgacggcagaggcggcaggtcggcctgcgagagcgggaagagccggagaaacttgtacgattcggccagggcgtagaagggcttgccaagcgccttggcgaggacggccatctggtaggtgccgacctgaggcggttgagaggaaaagggggttcagcatccggagtgggcgacagggagagcgaagggacgcacgccggcgaccaagccgcccgactcgacgacagcctcgctaccgacgatgacgaggtcgacgcggtccatgatgtagccgacggccgagtcgagtacgatcgagcacggtatgccaagcgaggtcagcgcagcgtgcgtctttagactgaaggaagttgaagggatggagtcagtccagcggttcgcccgtcgtttggaagctcatgcggagactggcgcaccctccgcaaccaggctgcaggaaagcgatcacggccatcagtcagcaataacccggctgagcagatgtagctggcggcactcacccggccctccgtcacgtagacgttgacgcgcttgttctggtcgtgcgccttcttgagtgccattagcacgacgcgcgagaacgagtgggtaaggatctgcaagtggccggtgataggccggaggaggaggtcagcgaggggcgcaagggcgaaccggacgcagatgagtcgcacggtgcagtcatcgcggaggaagccttggacgttggtcgcaattttctcccgacactcggccgctccgttggcggcgaatctgggccgggcagaggtgtgagcggtcggtaagccgtgcagctcgagcgtacctcctcagtcaggacaacgactgacttcctgccctcctcgacgatgccctcgcggatctcgtcgagcgtcgtccgtcgcccagcgttgccgaccgagtcccggacccagcgctcaaagagccggatcccagcctgagcaccataggtgacgaggtgtgacgagtagagtacctttgagttgtgctggagggcgagaaggaggtgcgaggttgtcgacgctgcgaggcgggtgtcctttggtcagcacaagcgcctgtgctcggagggaggcccgagacgcacccgactgcagggccatagcctccgagagcgccaggacggccgcaagcggcggcgggtactgtcgagtcggcagagcggcgagagcaggacgtcaggtcaggacaggacgcgaggtacaaggagctccgtccctcgaacggcggctcgcgcacctcgagcgccagtgccttggcgtactgctggagcacgagctggtccgggtcggtcagaatcttcgggctgctcattgctgcgaaagagtaggacgagtgcgaggcttttgagagtcgaaggccaacatgtgaggtcctccgagcgccctctcttgccctcggccgcccaggctgcgctgcccgcgacctcgaacggtgacccggaacgatatcgcctcgccctcttcttcaaagccgaccaaagcagaatgggagacatcccagctctactcaagctcctgacaagccgggcctcgctccccttggcggtggcgatgaaggcgaccaagtcgctcgttcccaaccacgctaccgtcgctgcgctcggcgcgctgtctgccgacgatctcgtcaagctcggcctcgagccggccgttgccaagaagatcgcaaaggcccttggcaagccagcaaccacagtatcgccgtcaaagggcaagcgcaaggctggcgcgattgtcgctggtggggacggtgcagagggcagtggctcaacagcggatccgtccgccgccggtgctcctcgtccgccgccgcccaagaagccaagggtcaagaaggtctaccgcgatccgttcgagatcgcaagcgagcaggccgaggcgctatctggcgagaagccgtaccctgcgctcgtatttggagtcgatctgtcggttggcgtgagtgatcaccgtctgctgtctcgctccgcagcgcccgcgactgacggccccctctcaacccttgacactgtaggaactgcatggccatgccgtcaagatcaatcgtgcgccggtcatgactgcctgggcgctcgtctgctgtctccgactcggcttcaacgagcaggaggcgctctcgttgggtgcgtcgccccgtctcgaacctcccctgtcgaccctagcgctgacctctgttacctgctcgcagcccactccttcaccgatgtcagtcctcactcgtcgaaagagccagcttttcttcctgaccgtctcccctccagctcaacgccacgtcaaaggccatctctctcggcatcaagccgcgacctagtgagagcaaggcgcgcgagaccgagctcagccggcgagagaacgacggctggcagcagccgcacgtcgttctgatgggccgcaagctacccgtcatgacgctccctccggccgagcaggattcggacgacgagaccgagcctgtcccggtttaccgcgcgctgtcgggcgaacattcgacctcggtgtcgccgtcgctcgcggcgcgttacctgcactcctcgctcggcgaatcgctgcccttccttctcagggcaatgacgctcgtcgctgagagctggccgtccgaggagctccaaggccggaagggctgggagatctacatttctctccggccagaggtcgagggctggggcaagaagggagtcgtccggatcgagagcgtcctcgcgctgacgaaggaggacgaaggcaaggtcaaggctgagatcaagggacccatcaaagccgaggacgagtacgacgacgtccaggtgcgtgtaacagcggtctcgcgtgtctcgcgccggtgcactaacatagtctccgccccgatcgcagttctgggacgcctttgactttgacgaggccgagctgctcgacgtcaagccctcgatgccagccgtggccggaagctgagcccatctcgtgacatccgacgccacttctcaggggctccttcgacggctcctgctaagggcaagtcgcaagcgggacgccccccccccctcgttcccgccgacctcggccgcgcacgtgtcatcagccgacggcggccaaacgtcctcctgtcaacctgccggcatttttacacactcgtacgaggaccgcgccacctggtcggctcccgccttgtcgaacgccagtcgcgtcaaaatagcccgacgagtgagatgcgtgctgccggggtcgcggctccgggtggtgggccaggtagtggtcgacggggacgggcgatgctggccgacgacgacgcaaatctgcatggccccttcttgctcttttgatttgacccagcctgacctgcgaccagcagcgctcagctcatcagggcagccctcgccgtgcgatgacacgtcggtgtgctgcgcgcgggcccatgcggccttgccagcaagcgcgaagcgcaaagcgacaggcgccgactcctcctgctgacctcgacaccaccagtgaaagcccgcccttgactcctcagtcttctctccagcttcccaactctctctcccttctctcagccatgtcgacaccgagctctcgccggtcgtcgctgtcgggccggctcgcggcgcccgccgtccgaccgagctcggcctcgcccgtctcgagctggaccaacccgcccctgcgcaatatccctccgagggtgacctcgcccgcgtcgcacccggcctcgccgccagcaggccagtcggctctcacgctcgaccggcaggccattgacggcggcaaggtctcggcaagcaacctctcggcctcgctcggcaaggtcgcccagcagcaacagcaggcggccgccgccgatggcgcctcgccctcgtcagcccagcagcagcccaaggactactttagcccggccgccgccgggccatcgtcgacgccggcctcggccaacggtgccggcacgtcgacgccgaccaaggactacccgtcggcgctcgatgacgtgcccgatgaggagaaggcccggatcctcaaccggcacctcgtctctgcctcggagcgccggggcagcaacgcccagtccgccggcgtacccgaccgcgcgagcctccgccaggccggcgccctcaacgagagcggagtctcgctcgccgacagcaacgccgccagtggcgatgatgccccaggagaagagttctcgatcccttacgagtcgcagggcggcgacgtcacgtgcgtccggtccttcttcgcttcggctcccatcactcccttgcgcttcggccatcaccgcccgtcgagccagcgggccctcgcaatcgacccacgcagtttcctgtcgctgaccccatccattcctctctaccccgacccttaagccacgatctctacaagtgggcgcagacgcatgggtcgacgagcctccgcaagacgcgctcggcctcgttctcgcacccgtctcggaacggcgaagaggcttcgacctcgacctaccagcagatcaaggagccgggcggtttccgccgcaactacatccacgcccgggcccaggagcgcggggaagagagcccgcgcacgctgcgcaacgtcatcgacttcctgtacctctttggacactttgtgagttgtcttgccggtgcgctcgccttgcggctcactgaccgcgatgccgtttgtcaaatcgcaggccggagaggatctcgaagaggacgacgaggacgaggaggatgaggacgacgacggtctcctgccgtcgacggttccgtcgtcggagcggacgccgcttctcgccggtggcgggccgcagcggggcacgctatcgcggtcgatgtcgcgccatcgcaaggctggcgcaaactcgatccatggcacggcgaccgcgacggaagccgtcttcatgctgctaaagggctttgtcggcaccggcgtcctctttatgggcaaggccttcttcaacggcggcatcctcttctcggccgtcgtccttcttgccgtcggcttcatctcgctctggtcgttcctcctgctcgtcaagacgcggctcatcgtccccggctcgtttggtgacattggcggcacgctctacgggccttggatgcggacgacgatcctcgcctcgatcgccctctcgcagattggctttgtcgctgcgtgagttgctgtggcaagaggccgtaatccgacttggctgctgactctgtcgcccaccctgcagctacaccattttcgtcgccgagaacctcgaggcctttatcatctcggtcaccaacggcaagacgagtgtcgacatcaagtggctcatcctcgcccagatggtcgtcttcctgccgctcagtctcgtccgcaacctcgccaagctcagtggaacggccctcgtcgccgacgccttcatcctgattggccgtacgtctgcgcggcattgtaggtgactctcgcggatcagaactgattttgcttgacgcgccgccaacagtcgtctacatcgcgagcaacgagacctcggtcctcatcgaccgcggtatcgccgatgtccagctcttcaactcgtcgtcctggtcgcttctcgtcgggtgcgtccgaccacgcccgattccgaggaggtcctgcgactgacgatcacttgcgctttgttggatcagaaccgccgtctttgccttcgagggcatcggcctcatcatccccatcaccgagtcgatgaaggtcagtgaggacgctcatgcgatgagcgagcgcgatagacctgacgctctctcgctcgatgtctccaggagcccgagaagttcccccgcgtcctgtcgggcgtcatgatcggcatctcggtcctgttcgccggcgcgggcgtccttagctacgccgcttacggctccaagatccagacggtcgtcatctcaaacctgccgcaggaccgtaagtttgtccaggtcgtccaggtgagtcgacgcgtcctgctgaaagctgcgagtcaaggctgctttgctgatgcgtccggcgacccgaatgcccgccagtttctctactcgctcgccatcctgctctcgaccccgctccagctgttcccggccgtccgtatcatggagaacggcctctttacgcggtcaggcaagtcgaacccgcaggtcaagtggcagaagaacatcttccgggccatcaccgtctcgggctgcatggtcctcgcctgggtcggctcgaacgacctcgacaagtttgtctcgatcattggcagcgcgtgctgcatcccgctctgcgtgcgtccctcgcccgagcctccctcactagatcgcccagccggctgacccttggcgtgctcggcctgccctcccgacacgcagtttgtctacccgcccctgcttcatttgcgcgcgggcaacccgaccaagtgggctcgcatcggcgacatcacgctcgtcgtctttggctgcatcgtctgcgccttcacgacgacgacgacgatccagggcatgatcgcctccccttagatctcacgtctcgactatccggcgcgccgccgtacaatggacatgctgattgctcaatcgaaggaaggctacggactgccagctgtacatcgagatctccccgcgcctcaccacccgtgctgccaaatctgccctctcgcgtcctcgacaacgagaccgacgtcgcagagcatgcgcgccatcgcctggaggcccggcatgtccgctcgtcggctccagtcaatggcctcttcagcccggtcgattctgatgtgccggaggctcggcagtaggccagagctgcgggccgaggcaacggcgatggcgaatcggtagagctcgtgctcttcctcgacgtctgtcgtctgctcgtcgtcccaatcgtcaaagacgtcgtcctccgatgctgtcgcgacgatcgaaagcttgacgagtgcgcagtggccctccccgaggccgaccaggagtccagccaagttgaagccgtgttggaccgtcagcaactggaggctcggcaggacggcgagcaggttgacctcggcgacattgacctcatttaaggacagcctgagttcctccaggaccgtgaaccgcttcaggacgtcgagaaggaacgggagagagtcctcatagaggtcctcgacggcgaggctgacgaggctcgacggcatctcctcgaacaggctgacgtcggaccacccatcgtagccaaagctggtcggtgcgcatttgaccgccaaggccgtgaggccggcaaggtcaaagtactcgccgagcgtcgcaaagtagaattcggggtccaaggccgacagctgcaggccagtcaggcatggccggcggtctcgcctcggaggctgaggtttcttgtccgactcaatcgcccatatcaggttgtagagccgcttgacgttgggcaagaggtcgaggtgttggaggaacgcagtcgtctcaccggctgactcatcgtcgagctggacgaagcgaacgagtgggccgagcgaggggtagcgccggagcgtgttgaaaaaaaagggaatgtcgcactcgaggacacggctgaacaacagaggctgcgcctcattctgccggggggaggtcggggaggggcggaacaatcctcagcgaaacggctgggtcagagaggacgcggtcgcccgaaagtggccgccgcataccttccaggcccgcgagatttggcatgcgacgaaaagcgatctctgagcggtcggagacggccagtcgaatgactcgcccgaacgcttttggccgaggtcgtccaggccgctggtcggcttgcgctcgtcctcccaattgaggtcttgcaggtgcgccagctcgcggatgacggcaaactggatctcaaccgggatatggggtggcctacgggcggagatggggcagaagagtctcgtcagcggacgccgatgacaggaccactcgtcactaggctgacatcgtatcagatgttgagagtgacggctgcgatggacgaggtcagccggtagatgccgcaagggcggcaaacgagcgcatcagttgcaagtcgccgcaggggtagcgtaggcttcagatgcacctctcttgacttgagccggtcgcgagaggggagcgttgtctgagaaacgacagagctcgacaagccgggcttgggagagatgaagcaggctgggctgaggcacgagcggcctttggcccgtcagccgggcttctcagcatctcctggcggagaagcacggcatactagcacggtcacaagccagactgacttaatggtgccggccgccagcaagaatggagagctggaaggggtcgaaggtgctggacaagcgacgtcgaagcatcctgccgcgacgtgagcgagcgagcttcgctgcgcgctccgaggccgccggccgcccgcccgactagtcgtcgttcgcttcgccggtgcacttttccgaccaacgctgagcaaaagggcagcgtctgggtcaagggagaagagtcatgaatcaagggctccagaaagtgggatagaaagtgggatgtggggggcaacaaggtgcatgcgcgacgtgctcagtacgtttgcggcgtcgggtgggcgtggcctgtcttgagcgcggtcccctcggcgatcagagcctcgttctgaggacgagacggagacagtcagcgagtgtgatgctgacggtgaggaaccaaaacggacgcacgtgagtgaccttaccgacgacgacctcgatcgtgcccttggccttctcgacaaacgtcggcttatgcccgctagggtgggctgccgtctcgggagcagccgagccgggcgcatgctccttcttgtcggcctgaagtggcgggagaaggagggtcaggcttctagaaggtcagcctctacactttgagagtcgaagcggccggactagcaaatctgacctcaaggcgcgcccgctcggtctcggtcaactcgatacggtcgctcgggtggacatgaccgacgtgagcgccctgaccggtcgtcgggtcgagcgccgccttgctgttcgagaccttgctggcctcgtgcttattgtgggtcgaggtcgaggttggggagcggtgcgagtctacgcgccgagtggaggacgacgattagcagcgctctcttttacttgaccagcgcaaggcggcaggcagacgaaccgatccctccggccttaggcgatgagtcagaggttccggaatcctggtgggccttgctgatctcgctgctcttgcccttggtcacggccacggcgtgaagcgggttgatctcagatgccgggtggctctggtcgatgggcgacttgtggtcgacgtggcggtccgagagagtctgcgctccgccgacggtgttgctgccctgtgcagtctgccgagagtcaagggggccggcagtgccgttggtcggcggcagcgcggaacctggaggagaagttcggcctgagggtcagtcgagggcctgctgaggggatggagggcggcaggtcgcaccgatgccactcatcgagtcgagcgggctggcgaggctggcgcctggatggccgttcttagtcaagacggcgctggtgctcgtcgacgagttgtggatgcgatcgggagcggcggcggcagacgagctggccaggtgtgcatggtcggacgtcgcagggctgccgaggtgggtgacagagctcagggcaggcttgagggcatccttggctgaagcgtggcggtcaaagtcttgcgcctcggtgaaacgcgagccagaaggactggccgagggcgtatgggagcctaaggaaggaagcagtggagattggcagccgtcagcaccggccagagctgatcggaagcaggcgggtctcaacgcactgatgcccgtcgtcgagtcgacattgtcgacgacgctcttggtaggcgcgttctcgtcggcctggctgcttgcggtcagcgtggacgggtcggctgagcgacggagcgacagcggcaggaagaccacctcggatcagtcggtagccgcgcagggcgagagcaagggttgctgacctggtgccggctcggtcgtcttggtgccggaggaaaagaagttgaacatgggggacggtcaacagcagagagcttcgagatggcgggaagggctcggaggtaggggtaatgggtgcaagacgtcgagaggcgcaagacggctcgcccttttaaaggaggccgcctcaacagactatcgctcgcggcggagcagctccgataaacccatgaggtcacttcgagcgtcataaaggctgaattggaagtcagggggttggcttggcgagcgagaggggtgccttgatgacgaggtcggtgtggttgacaaaggggttccggccgagagggctggacgggctaacggtctgtgcctaaccagccgcacagagggaagacgcagagagcacctgagatatttgtagattggtgaagagctagtcgggtcagtgtacgtgacgtgacaaggacaggagagaatgcgggaaggaacctgcgtcgtcaagcgacagggagagagtgctcggacagagcgtccgatgagccccagacggcagcaggccgcctgggcaacgtcgacggcgacaagattggctcggacacagcaagtgatactctagagatgaaggaagcgtgccgccggccgagagacgcgcatgttgagggaccatcgacgggcgaggctgctgtttcttgcgcggttgagcacttcgcgccggtctgtacagcctcccggtcgtccggccggtcagcctcttcgagcgtccctacatccagatgagtacgtgcagagctggctgtatagtcgaggagcgtttggggcgaagtcgattgaaggacgacaagagccggctctcgcttcgggaggaaaggggttcgagcgcggcgccttgcgatgcgggcgccctctcctcggacgacgacgacgagctgcccttccttcctcccgatcatcctctccctctctttatcaagctacggatgacgagtctcctgagcgagcgccagaaggatgagctgtgagttgcttgacctggggctcgcgcagaggccttagtctcgagtgagctcggagagctcgcctagggctgacctcctccttccggccctcatgcttctctcgcctccggcagccaccgctctatgctcgactacctgcacgcagctggcctgcatgcctcgttcgacgcgctccggtcagagacggcgcaggccgagtacgtgcccgaccccaagggcaagacggccggcctgctcgagaagaagtggacctcggtgatccgcctccagaagaagatcatggacctcgaagctcgcaacgccgctctgctcgatgagctcaactcggcgccgtcgaactcgcgcaagagtgcgagccttgtcgactgggtcccgcgcggctcggcccggtcgacgctgactggccatcggagcccggtcacccaagtcgccttccatcccgtcttcagcgtgctcgcgaccgcaagcgaggacgcgagcgtcaaggtctgggactgggagggcggcgagctcgagcggacagtcaagggtcacactaaggccgtccaggacgtcgactttgatcccaagggcaacctgatgggtacgtcggtctgacgcatgcaggccggcgtccagggctgagacgctgcgccgcgagagagagacttgctgatcggaacgatggccctcgcagcgacgtgctcgtccgacctgacgatcaagctctgggacacgagcacagagtacaagaatacaaagacgctctacggccacgaccactcggtctcggccgtccgctttctgccgtcgggcgactttctcgtcagcgccagccgcgaccgaacgatcaaggtctgggaggttgcgaccgggtgagtctcgccagtctcggcctctcctctcgcaagccgcagcgcttgaccatgcgtcccttccaggtactgcacaaagacgctccacggtcacaccgagtgggtccggggcgtcgtcgcgtcgtccgactcgcgtctgctcgtcagctgctcaaacgaccaggtacgccggcgcctgttcttctcataagaagcccgtgcaagctgacctttgtccttctcgcagactgctcgagtctgggacgtggcctctggcgagaccaagtctgagcttcgcgggcacgagcacgtcgtcgagacggccgtctttgcgcctctcgcagcgtacccggtcctgctagagctgagtggcatcaaggtgcgcttctgcgtgtgatccggcgtcgggtgcccgctcacttctccgtctgctcccgcgtctcgaactgcagccgagtctgaaggacgagcgcaacagggcgcccggccagtttgtcgccactggctcgcgcgacaagacgatccgcctctgggatacgacgaccgggcagtgcatccgaaccctcgtgcgtcgctctcacccttctaggcctcagcccgccggacgctgctgactcgggcgtttaccgaccccagaccggccacgacaattggctgagggcgctcgtcttccacccgaacggcaagtttctgctttcggcgtcggacgacaagacggttcgcgtctgggagctcgcgactggccgctgtagcaagacggtcgacgcgcacggccactttgtcacttgcatggcctggggccgggcgctcgtctcgagcggcaacggcgagaacggcgtcaacggcaaggcgggcgaggacaagactgagcggagaatcaacgtccttgcaaccggcagcgtcgaccagacgatcaaggtgcgtctctcgccgtctctgatccacgtcgcctgctctatcggctgaccgtgggacggatgacggcccgaccaggtctggacaccatagcgcgggcgtcagcaagcctttcgcccttgtcgctcgagctgccggggcgaggttgatacggccccgccccagctgaacgtacgtgcatctgccggcactcgcccgcggaagaccctggtgctgacgccccgacctcgctcaggctgagtcaaagacgagttgatacagacggacccagctcttccctccagcttcccactccagtcggccatcggcggagattgcgcccaggctcgtctcgagcggggtggagagaaggaggcaggcatcacgtacgcccgtctcgtcgggcgcagcagcagctggtctgccggtctgccgcaggtcccgcccctgcgatgccgtccagcgagccgctcggaccatctccttgacggaggagaccactggcgcagcccttatgtatggacccctaatctggccagacagacgagagagacctgtgttagtcgagaggcggacggctcaagcttcgggccgtctgctgctgcgtcgatcgcctctctgcgcccccccgcgggcgaccgaaagcggcgctctgcgcctgatgctgttgtgagcgcggcgagccttgcctccttccgaccttgacccgttcagctcgcccacacgcacccttcctcctcgacagctcgcttcagctcgccagatcgctcggtagatcattcctatcggtaagctctcacagctagcgccggccatcctcgagcggcgaggctgatccccagttttgcttcgcgcctgcgctcctcttagacacgtcctcctccgaaccacctgtcccgaccgcctgacggccccagtcaagccatccagtcttggcttgcctccccagcgacgcctgagcgtctccgccgccgaaacggacccgctctgacaggtgcgacccaaagcagggagcaagacctcccaacaagtcgccgtccggcatgagctcgagctccggccgcgacgccggccctgctcgtgcgtccaccgtctccttctcggccatctctcggcccgcattcaaagcgaatcgtgccagagctgacctcaggcgcctctggttactgcctttggcagacaagcggcgcaagctctcgccgtcgggcgcgagccggagcccgtcgccaggaccatcacctgacgcggccgttgcacgcgcctcgcccagaccccttgtggccagcgctacctcggccgcctcgccgactctacctccatcaccagctcccatagctgctgctccgcccgtggatgtcgcaccggtcgtgccaaaggatccatccggctcgactcctgtcgcaggcgtcaagcgcgatcgctctccgtcgccggcgacgagtggcgggacgtcctcgtccggctcctcctctggctcgtcctcatccgggtcagactcggacgactcggactcttcgtccgggtcctcgtcctcagactctgagtcggacagcgattcggattcgggctcgtcctactctggcggctcgagcagctcggacgacgactcggtcgacatggagctcgtctcgctcgacgggccgacgctcgaggctcctccgacagcacctgccgcaactcctgcaactgcttcattacaaccatcaatagcagtctcaccaacaccagcgccggtccctccgccttcgcctccaccagcctcgtcggtcgcgccgaaaccctcaccggcacctaccgcgccgacgtcggtcgcggccgccaccgcctcggccacgcatgcgcccgcgctggccctaccttcgcctccagtagccgcgacttccccgaacaaagcaccaacgccgccagtcagcaaggtctcctcaccgccagctccttccttgccggcccctgtcgccgcgctaaaggtcgagaagccgggcggcccgacgcccgcgccggcagcgtctgaggcatccgcgtcggcctcggtcgctccagctgcagctccagagatgggcgcgggggaatcaataccagcgttgtcgagcgctgcgctcgccgcactctcggctttggtcctccctcagagcttccagacgccctcgctgccgccagcgaccccgtcggtgaccgagtccgcgcccgcgccagcagcagccgtcgcaacttcgacctcagccccaaaggcagcatctgcggtcgtcccgaaggcagctccagctccggctgcagcggcagcaacatcggtcgcggtacctgctacgacagtcaaggctgcgcctgtcgtcgggcagcccccaactggagcggctgagctgcccgccacgacgacagccacgactgtcgatcctgcttcttcaaccgaggcgcacaccgcgtcatcgggcgacctcgacctctcggcgctgatggccttcagcgccgctcttcaggccggccagtacccggaactgtttgaacatcagccgtcgagcttggccgagtctgcccaggccgaatctgaaccgacggcgatgggcggcgtcgagccgacctcttcggtcgctccgtctagcaccaccttcaccttaccattcgagggcggcgacccgatcgtgatcgactttgccgagctcgaaggcaaggcgctggcgggcgtctttgacgactcgtccgagatcttttcgctcgccccttcgggcggaccgagcgtctacaagccgccgccactctttccgctttccacgccttccgtcgcgcggccaccagcacgaccgcctgtgcggggcacaccagcccgtcttccaacaccgaccatgcgatcatcggctcaggcgcaatcgcgtccgtcgacaccagccggcgctcggccgccggctcctcggccaacagttgcccgaccgcccgccgcgcgaccgcgtctgtcgagcgccgtgcgccccccttcgctcgcccccgtacgcccatcggcggccacagagtttgttatcccagacgacttgtttgacatctcgcacctcgaggcggccgtcctcgaagggcgagcggacgaatacgagatggacccggcggagatgttttcgccgtcgcaggcccgcgcgctgtcggtgctggctccatcgagcagtcgtccgccaacaccagcacggccgccgcagcaagtctaccggccaactcctggccagtcagcacccggtacggccggtcctccgctccaacatcgcccacagccagcaagtgtcgggacgtccaggctcggcaacacgctcgtgcggcctggccagccccggccttcgtccactcgcccaccggcgacgagcgtcgcccagcctccgtactcacgaacgacagggcaggtcaacgctcaggcagggccttcatcgcaaggccttaagcagcgaccttcgctggcggccgtcgcgtcgctgtcgagcctgctcgatgcgccgttctcgacggccaacccggccatgattgcctcgggctcgcgctactcgttgagcgagaagcgccagtacctttcgctcctaccggcccagtcgctcgtcaacatcatcctgcgcctgaccgactcacacccgcaaatgccggccttcccgccgaacatcaaggacgtcatcctcgatctcgaggtcgaagcgctgaagccgcgcaaccgcagtgcgagcccatcgcctctagcgacggcgccgatgctccagcggacgccgagtgcgcctggcttgggctcgaccggcgttcgcagaccgggccctgtagcgggaccgtcgaatggcgcggcccgcccgccggtgggcaacgtcatggccagaccgccgggacctcagccgccgtcaagaccgacgacccccgcgcagacgcggccaatttcggtctcttcgggccctctgctgccgtcgcagtctcagccgatgacgaacggcgtcgcgacttcgcgtccgactcctccgcagacaaggaagcccgcaataagctcactggtccgtctcgcttgatcgactcgtttgaccgtgcctagtcttggctgacccaatttgctctcgtcaggcgcagccaacgccctcacaggcaacagctgcgagtgctttggcagttgccacagcagcgtcgtcggacagccatgaagtagcctcggcatcgtcgggctccatggccgactttgccgccgctctccaggtcctagtccactctggactcatacttcagagtccgacgtctggccccgacgctggctcggcaccagcgccaacgtcgggtcccccagtcgatccaccgccagcgccaaccacgtctccctcgccggccttgaccgcccaggaggcgccgacgctcattccgctgcacgccacgccctcgcctgcagtctcgtcgccggttctgccgccccctggcacagactttacgctggcacccctctcgcccgcgactgtcaacgccaatgcccaggccggactggcggcgcttctcgcccaacttacgcccacctcttgatgacccccttaatcactacccatgcacgcctcgatctgtcttgctgcgagctgagaaggtaaaaagaaaaagggaagacgggcatgcagagatgggagacagaggggggaagcaaatgtagggggtggggttgagaagagtagtacaagggcgtgaggggtagactagtacagccgcgccgaggcgagcagaggagagcagaggccgggcgaagcaatcactcgtactccttgatgagcgagatgagcttcttggcctcgagcttgaagtcgggctggtcggcccggcggatcgagaagcgcgcccgcgcctggtcctaaaggggcggcaaggagaaacggaaggtcagtcaaaggcggcggcgacgaaggagcgtgtgaggacccacgccaaacgtgtccatcttgccctggcagttgaagttcatgatcttgccgacggccttgccgacctcgcgctcaaacttggcctcgtcctgatcctacagtgacggatgtggtccgcgatcagccagaggacgagggtgcgacaggcacaaaaggaagtccagaacggaccttgagcgcgagaaggtcgttggcattcatgccgatcagcgactcgccaatctcgttaaagccggtgagccacatctggccggtgtagtcgccgatcgagagcgacatgatatagctgcggtcggcgatgaagggggcgggagtctctcagccacgcggtcaaggtgaagacgcaggcgggcagcgaactcaccggtgattcggcgccgggtagctccggtcgcacttctcgcatcgccagccgtcgccggtgtcggtcaccttcttctggcagccctcgcccgggcaggccgggtagctgatgttgtccttctttacaaagaggacggtcgcccggatcgaaatgtagtcgggcttgtcgttcatgccaatgttctcgtccttgatctcgaggatcgtcttgtagacgtcggtccgtccggtgccggccccggcgcctgccgagccgccgtcgcgcgagtgcgacttgaacgacatgcccgacgcagccgagtcgaaccagccgcggaggccgtgggcctcggggatgtcgggcgagactgacattgtgctcgagctaaacatcgaaagcgtccggccgccaaagtcgccgaccttgacgcccttgaatgcaatgacgggctggtcggcgatcgagtagttttcggcctgcttgccccagagcgtcagccggacctggaactctgaccggtcgacgagcgtgatgtcgcgcttcgagatctgtaggcacgaggcgaggaggatctcgatcagcagcagcccacgatctgaatgcgccgcgtgcccgagacttacaggcttttgcgaggccttgccggtgatggagccgagctcgccaacctccttgacgacggcgagaacgtctgtcgtagcaggtgatgggcgcgagaggatcagcgcctagccagccgagaactagcaggattcagcgacgcaccacacgtctggtccttctccatctggtcgagtgaggcgagctcgacaaagttgtacttgacctgagggacggcgccttcgtcatttgactgcgagggaatgccgaggggcgggcgcgtcagcaggaggcgacaatcagggcaggcggtaagtgtgagggcaaaaggacgcacgacctcgatatcggtctcgcgcgagagcgtaatctcgtagtcgttgttgacgttcgagaactgcttcttggcaatgttgatccgcgccttagagacaaaatagacctagtggggagacgcaggtgaggatggggtcagcaatcttcgcgggcagaaaccgactgggcaaactgggtcgcaccttgccctcggtcaggaagtcataccacttgtcaacctcctcgttgaagcccgtcgcacggatttctccctgaaagcacggcagtgggacgaggtttcgggtcagttacggccgcgagaccaagccgcgacagacgcagacgtaccgtctcgtccatgaacgtgcacgagaagagcttgccctcgccgcgggcgttggaccagtgtttgatgtccgacttctgggtgacgcgggccttgatcgtccacctgtcgaggaatgaggagtgtcgtcagcacgagtggcttcgcgtcgcgcccgctgacgagctcgcgtgcgccagaagctccgccgtgcccgcgatgaaaagagtgcgctggacgcacttgttctggtacgggctgaggccctcgatcgggtagagcggaccgtggtcgttgctccggccgctcttgctgccaccggccttgctcgaggcggcaaagccaccagtcttggctgccggctggggcttctgctgctgctgctgctgctgctgctgctgctgctggaccggcgcgggcttgaccttgaccgccggggccggagcggcaccgccctcggcggcggtcgccgtgtcgacgttcttggggtcgccgatcttctcctcctgaccgacgacgtcgaggccgaggatgatgacgagccggcggtcctggaccatgttgagggcgaagctcgtgagcttgatgagcgtgttcttctggacggcctggctctcgagcaggtggttgtgctgggtcgcgagcatcgcctggatgaagtgagcgccgtccgagaggatgagccggtagcggtccgacgtcggcccgccgcccgagaccttcttgacgtggaggacctggaagacaggctggaaggcgtcggacgcgtttggcgactcgctgctgtgcagcgtcagggccgcgtcgggcgtgagcttgtcggccatcgttgcgagcgcggcttttgcagagtgtggagcgagaggattcgatgttggagaggagtcggccgtagcttgagcgagagagaaccaaggggcgatggggcgaagtggaaacgagctcggtggtggaagaggagagggagaggacgacgcgccggcgcgaccagctcatttcgcctggcgcgcgtcgtctccgcacgcgcgcgcgggcgtaatcgacgcgactctctctgcagcgcgaggtggcaacgagaaggagtgcatctgatgagatctaagagagaccggaacaggcggaggggtataaggcgtgcgtgcgggtgcgaaagaaacagcagaggaattaggagggaagaaggggtccagcgggggtcgggtgcggcggcacgtcggctcggcgcacgacaacgggcggctccgtcagctggcctagctgctgggcccgcaacatgtagcagactcgaacgtaggcgtcctaggagcgacgatggtcttaaggactttttgacaggcgggcctcggcctcggcctcgacggcgagcgcaatctcgtcctctggaaggcgagcgggcgaagagcggcaggcggtcagtcgcgttcgtccctcatccgcctcacaacgcgtcgcagcactcactgggaacgataatccgccggccgtcctcgccaatcttctcgagcttcgactcggcgaccccgttcgacgaaatctgagtgacgctccggacgtctttggcgacgcctggtccgagcggcgagcgctcgctgaccgtttcgagcaagctcggatccgggggcgagatggccgacatcggggtgaagattgaagctgcggccgacggcaggtggaacgacgacacgggcgaggacgagagcgagaggtgcgagagcggtgcggcggtggagggcgagacggggaagccgccggcgctgccgccggccgcccctgacggcggtatgctctgcgggctcgaggtcgctgccggccgcctgctactgcgaccgacggcatcatcatcgtcgtcttcgcccgcgttagcgttgaatttgctccactgggacgaggccgccgtcggcgtaaagctcatctcctcgtcgctgtcggcgccggcgtctggaatgtggatccggccgccaccgccgccagagctgctgctgccgaacgacgacgagccgatcgcgccgtcgtcgtcctccgagtcaaagtcgcgaaactcggcctggaacgtcgcgtcgttccactcgagcgcggcgagcgcctccgagttgggtccgccggccgtcgatggtccagcggtcgcaaagtcgtcgccgaacgggtcgtcggcgccaccgcctgtcgagggcgtcgactggaagacgccccagtcctgagggacgcgcagaagatgcgctgtcagggtttctctctcggtggaaggcggcagacagtagactcacgtcgtcgtcaaaggcagaagacgcgccgaaggggtcctgcaaagggatgagagagggtcagcgacagggccggccagaacgacaactcatcgagacgcaccaggcgcgacgtgctcgacgggacggtcgctgtcggctggaagctatgccggtcggccatccactccgagtcctcgtcgtcgtcgtcgtccgaagacgactcgaactggcggtccgtcgtcgacgagccaatctgctgggccatgtagcgcgagaactgccgagcactcttcgtcaacaacacgaacaggtagccgcgctcccgataggacacaccatctccgaggcgttgcccgtcccattcgagtcggtcactgcgcccgatccgctgccactcgtgtccatctgctcggtgatctcctcgtcgctgtcgctctcggcgtcgtcgagcgcactcccgctgccgcccgcgagcgggttgacaacgggcttgccgccgcccatcatgctgttgtctttggccttggccgcggcatacgggccggtcacgaagatatcccaggcggcgccgtcgtacgtcggcgtcaggaacgccttgaggtcgtctgggcagtcggcaaggaacttgagcacgtcttcggcgatcaggatgagatggcccatgttgcccagtcgaaggctgtggggttcaggcgatcgcatcagtcgtctggagagcgcttcagtagagacgggcgtaagggaaggaaacgcacggggtagcgtcctgccgacgctgaccctcgagcaggtggttgacgaggccgcacgtcttaaagaggtggacgatgagcgcctggttgaggccctgctcgagcctgctcgacaggatctgctggacgacgtcatagacgctactgtggagaaaattgttgagcgggaactcaaggaaaaggtccttcggagagagggggcggaacggtcagttggcaccggggtgagtttgctcgctcgacagagacgaaccagcaacgaccccagcaggccgtagtccatgatcttctgcttgaggacgtcgccggcggacgggacctcgtcgtcgtcatcgtcgtcgctgtcctccccgctctcaccgtcagtgccgttgagagcgccgttgaggacgtcaagcccgttcaggccgcccatgagctgaccgtcccggtcatacttgggaccagtcccgaccggcctgttgaggacggccatgttggagcagtgaagaagctcggcaaagagctcgatgatacggaagcgctcgagcgtaagcgccggccggatgcctgcctcgggcgcgatcggggccgagctcagccgctggcggagttcgccgaccttgtcgctgaggacggcgagaaggttgccgaggtggacaatgccgaggcttgcgttaagatcctccatcttctcctcaagctcgactcggtccttggcctccttgacatcgtcgtcgtccatgtcgttctcaccggcgagcagcgctttgttcgcctgtgccgtcgagtgcgacataaggccgttgcggagcgtgtggaagaggtgcggctccgagtagtccgagttgttcttccggatgagctcgatgaagatcgaaatgacggcgacgagcgacgacgaccgcgtgacggccgcctcttgcaagaggtcggtcgaccgctgggtcggcgtcgtctccccgccgcgagcaggcgaggaagcagactctgccggcgcctcttcgctggaggttggcttttcctccgaaaccggctcgagcatgaagccgacgagcttgcgaacatgctcgtccgaaacgagttcgcgggcaaacttgttattgcgcgagccgccgaccgctccgttctggtcgcctccgccggcgccgttgccgttggtgaacggcgtcggtgcaggtgcagacatgatgatgatgcccttgaggagctcggccgcggcctcgtgcgtcgcggccgagtgcgccggtgcgagtaggttggtgaggcgcggaatcagctgctcgtcagagagccactgccgatcagaagagcgacgtcagcccaaccgtctacctggcgccaaattacacaagactcacgccaaggacgccctggccgtcggcgttgtcctcgcactgaatgattcggatcaggaggtcgacgacagcaggtgaggtgatatttgcgagcaggcgctcgacgatggccggctgcatccggatgtagccgagcatctgcgcgtcgcagagtgtcagcagcgaaacgacacagatcagaggaggatgacgcacctctgccgtcttcttgccgaggagatgcgagttgacccggctccactggccgtagatgacctcgcgctcgttgtcgatcaagtcgagctcgcccggctcttcacggggcttgtcgctcgcgtcgtcctggacctcctcaaactcgtcctcgctactctcgtcgccagccgtgccggatctcgcgaccgctgccggatgccagccctcggccttggccggctcgggtgctgtgggccggacgggcgaagaagcggccgcggagggcgactcgtcctcgaggtccataggcttctcctcggctgagtcgtccgtcagatcgacgtccgtactcaatgagtcgtccgaagacatgcggcgctcagccagcggctcctcctgcgcgctctcgacggcgtcagcagcggcggtctctgataccggctcaggctcggcagcggtaccctctgccaaggacctgctcgccgtgtcggcaggcggcggacctaggatcgcgtcccagaagggccggagaaactcgtctgggttggcgagcgtcgtctcggtgatggcccaggcctcggagcagaggacctctgacgcgagctgccggaacctggggtaggcagcagctgtcagtcgctgaggcagcgcccgaacgcaagcgagctgcacgccagcagcacaggtagcccagtggcagaccctgctagaagacgcacctctgtcggcgctgacgctcggcgtccgtgtcgtcggccggtagccggggctcaaggcccttggtgacccagccgaagaggccgcggaccatgtcgggctgaccgaggaactccatcagcttggcgttctgcgtcttgcattcggtcaagaggtcgccgtcgtcgagcaggtcctcgagcagcggcggcggatcgcgcgagagcagggcctcaaagttggacccggtcggattgacgaagcgccagaacatggcgggcgggcgaggcgccgggggggtcgggaggggtgtcgcaggaagagggtgcggccgggatccgaagacgggctgcgagacagagaggcggagaccgagcggagaggatgggaatagcgaccgacgaccaggagcagcacacgacaccggagaggaagggaagagggagcagacgtcgacggaggcacagagagagctggctcgccaggcgacccgcgcggacgacctcgcgtgcgagcgcgcggggaaagggctctgcggggggcagcttcactcacgactaaaagagttgtaatcggctcattacagagatctgccagcgcaatttgagtcgagcttcattatgttcacagtcgctcggagtcgaagcctctttttccttctgccgccttcgcccaagccttcgcccggagacggccgctgccgccccgttccgctgccgacgctgcttctggattcgcgtcctctctgccgacgccatcaaccctcttcttctcctcgcaagacccgccgctcgttgccctcggccgcttccgcttctcgtacttctccgctggccgatcaagtatctctcaccctccgttcgcatcgaaaaggccaggctcttctccatcatgcaccgcacctcggccggcggcctcgctcggctctctgcgtcctcagccctcggcgctcggggtgcttaccggcctctttcttcgtcggcttcagctcgtcagtgagctgcagacgtgcccgggtactgctaggtccctactgacccgattgggtaatccctggtctggccggcagtcccgaggtcattctcatcgattccgctgcagccgctgcgggcggccgcgacctccaccgcgtcgtcgtcagcacttcggcagcctgcacggttgtcgtcggcagcgctctctgcctcccggccacaaattctctgggtgacgacggcgagcgggacgcccctgatccgagcgacgagcccctacctgctcctctcgcggtcgtttgcgacgccctcgcccggcggcgacccggcaacggaggcggccgagctcaaggcggcgctctcgtccgactcggccgctaacctcgcgcccaagacggccctcgacaaggcggtcaaagacgttgttgccaaggaggccgagaaggacgacggcaagaagctgacgctctgggagaaggtcaagaaggaggcccggcactactggcacggcacgaagctgctcggcaaggagatccgcatcagcgcaaagctccagcgcaaggtcctcaacggcggcacgctcacgcggcgtgagcagcgtcaggtatgtagatcaactattgcagcggatatagacgtggcattcgctgagcttctgccctcacattcctcttcgcagctcaagcgcacgacgaccgacctgctgcggctcatccccttctcggtcttcgtcatcatccccggtctcgagctcgtcctgcccatcttcctccgcttcttccccaacatgctgccctcaacgttcgaggacaagtttgcagcggtgcgtgctgcgcgctttgacctttgcaatttctgccgctgacgagcccttcctcctttctcgtgcaggaggagaagcagcgcaagctgctgaaggtccggatcggtgtcgccaagttcctccaggagacgatctcggagagcggtctcaaggccaacgaggtcgtcaagtcggacgagttcaagcagttcttccgcaaggcgagtcggccgctctgcgctgacggccagcgttcagtcgctgatctttctgaccgcttcgctcgctccgcaggtccggtcgacaggcgagtcgccctcgaaggaggacatcatccgcgtcgccaagctctttgagtcggacgtcacgctcgacaacctgtcgcggccgcagcttgtctcgatgtgtcgctacatgaagatccacgcctttggcaccgacaacttcctccggcaccagatccggagccggctcgagaagatccgggccgatgacaaggtgatcctcggcgagggcgtcaagtcgctctcggtgcccgagctccagatggcgtgccagtcgcgcggcatacgcttcaccggcgtctcgccctcggccctgcgcaaggagctcgccaactggatcgagctccactactcgaacaaggtttcgggcgttcttctcgtcctcagccgtgccttccacttcaacgaggagtcggccgacgtcatcaagtcgctcgaggtgacgctcagcagcctgcccgacaagctgctctctgaggccgagctcgacgttctcggcgaggaggccacctaccaggagaagctcgaggtcctccagcagcagcaggagctcatcgaggacgaggccgagcaagagcaggaggaggaggccgcccgacgcgagaagaaggaggtcgacgaccggctccgggccgaggagaagacgcggcgggacgaggagcgccgtatcgccgagcaggagcggaccgacgctatggctcttttgccggaggctgaggtcagtccaacagctgctgaaagcttgcacctgacggcctcgctgacctgccttgccctctcgcagttcaaggagctcgagtccgcgcacgagtcggatgatggtacgatgaccaaggagcagctgaacgagctcgccgaggctcttaccgtcctttcggccaagtcgtcgatcgtcaaggagcgcgaggagctcaaggcgctcatgcaggacaacatcaagtcggagcaggttcggcccggcggctcccgcctgcacatgacctattttgtgcgtcgactgactcccactttgcgccccccccccccttcaggagtcgaagctgcaccccgaggaccatgacaaggtcgaaacgtcgctgtcgaagcggatccggtcgatgatcaccaagattgataagcagctcgaggcctacgatgccaaggtcggcggctcgctcaagatgattgacgtccacgagggcaaaatttcgatcgccgacctcgagaaggcgctccaggtcatcaagcaccggcccgagcaggagaacgtgtcgacgatcctcgacaagctcgactcggaccacgacggctttgtcgttctcgacgaggttgtcgctctcacccaggagaacggtgcgtcctggttctctcatgactcgattcctgtctaccgtccctgaccaaatctacgcatcaggtctcggcatcgtcgtcgaagactcggcactcaagctgctcgaccagggcgccgtcatcaaggacagccagaccggcgccgacagccgggcgtaggacgaagggcgtcgtgtagtgcgcctgctgtagacatgctgcttggaccctaccatgactggcttggaggaagaaaggacgcgcactgaaggcagccctctccggttcgagagacgcgcgcgcgcccggcagccggcagcctgttgcccgctcgcaggcgacgcgagactatcgtccatccgacgagtcccatccgtaacttcctctgccacccctaacggcatccacgtgagacccattcggcctcgcctcgctcaggccctcctcgatcctaccccgctcgaccatcgctcgacgggtcgaagctccaaccccgccggccggctcccgacctccgcgtgacctccgacctcgacctcgaccgcgatccctcgcccagctcgcctgacgaaccctccgcccggagcattctttcgacgcgtcaaagcctctcatggccttcatccttcagcgcagaggtctgctcgtcagcggtggcgtcctcgtcctgctcatcttgacggtcctcctcagccacggcacggcctcaagttcggtcggcgacggcggcgcccgctggtggtcgagcctcggtgtggaggcgccgagctggggcgggccgacttacgcgcctggggctgtcgtctgcccgcaggttcaggacaatgcggcgacaacgctcgacaaagcgttcgtgacgctcgaggagggcggccactttgtcggtcgcgagacgcgttacctgcgcggcctgcccggctactgtgagagcctccctcttcgcttgcttgctcagcctcacgtccctcgaccttccgggctgacctcaagctggatgaccctcgctcttctacagcgctctttgaaaatgtctacacgatgggcggcatgatgggtgcgtccggccagctttgacccactggcgagctcttctgcgccacagacggctgacgacattcgtcctgctcgaacagtcgccgtcacgtcggatccttcgagcctgccgccagtgactaagatcatgtccgacatgtcgagaggcacgcctgaggaacccttcccgatcgcggatcacacacgctggctcgtgctttcgcctgccgaggcggcgacgcgcctgaaccgtcgcgaggtgcggccccacccagagacggagacaggaagacgttcgagataggctgacgttcgcatcgcatctgaacttgcaggccgccaggcttgttgggtcgaccgtcttcatcaacgacggacctggcccggaaggctaccttggtgcgttcggcgctttacggcagctggtcgcgtctcgctgaccgcttcgccggcgcttcatccttgcagcgcactacttccatctcgcggccgagctctttgccggcgcctggcgtgtcctcgccgcggctcccgacctaatcgccaagggcagcgcaatgagcatggaatttccccggcgggtcatcctcggcaagggccaggattggcgtgacgtcccgtacgtcgacctactcgcatccgtgccggcggagcgcaaaagctaatcccctctcacctcctgcagcggtctcaatgcttggttcatggcgaccatgttcccgatgatggctgtcgaagactcgatgcagtggaacggttcggcccctcctgccacgctcgatgctctggccgcctactgactttacctcgaccgcctcgtctctcagaccgctcgctatcggagaacctctacatgtttgaccaggtcgtcatccttgaccgctgggcctcgcatcgacacaacccgacgacgaggcagtggaacaagatgaacggtggttcgtctgacggctggtttcgctcttccatggagaggcgcgcacgtggcactgaagcccaagtttctcccctgcagatgtcttccgcgcggtcgatgcaccggccgactggtgggcgcccgtccggcagagcatgatgcgcaacctcggcattcaggacccggtcaggaagaacaaggcctcgatcgtctatatcagccggtgcgttccattcgacaacgcagcgtagcgccagctgaattgtccttctctgcctcgcgctccatcaggcaagcggcggccaagcgccggctgacgcccgaggcgcacgccgacctgatcgcggccatccgcgacatcccctcggtcgagctgcacgtcccgcagatggagctcctttcaaagcgtgaccagatgcggctcatcagccaggccgacgtcatcatcggcgtccacggcaacggcctgacgaacgagatctggatgaagcccggcggtgccgtcatcgagagtgagtgtcggcttgggtcgcgtcgtgtgactgaatctcctgcagactgaccttctccccctcttctggcagtctttgacgtcggaggcttcacccgggattaccagctcgtgcgcccgccctctgtcgtttgactcttacctcgacgcccatcgttgactgaccccccttacttgcgtccagctcaccgagccgcttcaccacagctactttccaatctggaacgacaaggtttacgactgggcggccgacgtccctggcttcaagctctcggacgactttcagagcacgacgctctcggtctctgcgcccctcatccggtcgctgatcgaggagctcatcgagagcaaggcggtcgacccgaaccggccggcgcacctcagccgcgagagcgcggcccaactcgacaaggagagcgcggcgcacgcgcaccatggcgagggcggaggggcgcccaattcggatgtaaagctgaattcgccttccatcgaggaagagctgatggacgacgagtagtagtgagggcactcttggaatcatgtcttttttcgggccaaacaaaaacaaggcggcggagtgagcttccattcctgtcgagccacctggtaccccgcctgatgatgtcgagccaacgtcaacaactgtcggagcgtcccggtgctggctctcgtaaagcggcgtgagctagggaagggtgcgggccccgggccggggcaggagcaggagcttcggagcagcagcaagcagcagcagcgagctcgtcgttaccagggccggccgggaggagggccggcgactcagcagcagggaaggccggcggctgtcgcccgcttccgtcccagggccgagggcaggcacacgaccggctgctaggtcaagagagctggagcgacgtgtcgggcgagggtcggtcgacggcgggcgcgagacgggaccccgcctgtcgcccgcttacggccggggcgcctccgtccgcccggcacttgacacggcttgacacggcccggccgtgcagcctgctggcgtttcagcccatctcctgactttctttcagcccaccaacacccacctcttcgacctttgcctccttctcctttctccttctcattctcaatccatctgcccaccatgtcgccgcaagagacgcccatccagaccgagatcatgaccctcacccggtgcgttcagcctggcttgcctcttccccaccgcacgcgacctgaatggtctttcctccttgcctcctgctgctgctgctctttttcgagcggtggctcgagcgcctaggaggcagggcctggcgccgtgttctcgcaacgctcctttgaagcacttgaactgatcatgccgctctcgctcccaaccctcttgctcgtctggctcccgccggctaccgctacgcgccctccctccgcccgcccgccgcccgaaaaccgccttctcccttcgcaggcatgtgctgagcgagcagcagaagctcggcgccgccgcctcaggcgacctcaccctgctcctgatcgccattcagctcacgtccaagttcatctcgaccaacgtccgcaaggcgagcctgatcaacctgtgcgtcttccccgcacgggcgcgcgcgcgcgcgcgtctgcgccgtctatctcgcccgggccggacgcctgcgagccggccgccagctcaacgaaggctgacttgtccgttcactcgcagcgtcggtctcgccggcgaggtcaacgtccagggcgaggaccagaagaagctcgacattctctcggacgagattatggtcaaggcgttgattgcgtcgggcaagtgctcggtcctcatcaccgaggagcaggagaatgcgatcgtcgtcccggacggcccgctcaagggccagtactgcgtcgtctttgacccgcttgacggctcgtccaacattgacgccggcgtcaacgtcggtacaatctttggcatctacaaggtcaaggagggctcgaagggcacggtcgaggacgtcctccggcccggctcggacatggtcgccgccggctacaccatgtgcgtcccggctctccttttctcgcgcttgagggacgcccgctgaacctcgacctctcgctgctgcgcccccaggtacggctcgtcgaccaacctcgtcctgacgaccggcaacggcgtcaacggctacacgctcgactcggccctcggagagttcatcctgacgcacccggacgtgcgttgctgccctctccactttgtgtgcgagacgaccccctggctgacatccttcgccccctcctaccgcagatccgcgtccccgaccgcggaaagatctactcgttcaacgagggcaacaccgagtacttccacccggagaccaagacttacctcgactcgattaagcaccccaagggcgagggccagaagccctactctgcgcgctacattggttcgatggtcgccgacgtccatcggacgctcctttatggaggcatcttcggctacccaggcgacaagaagaccaagtctggcaagctccgcatcctgtacgaggccttccgtaagtgcctgcttccgtttgtctcgtcggtgtaagtagcccccgattgacctgccctctttcctttgtcagccatggcgatgctgatggagcaggctggtggcctcgcgacgaccggcacgacgcgcatcctcgacctcatcccgaccggcatccacgaccggacgccgatctacctcggcagcaagaacgacgtcgaggacatccaggccatctacgccaagtcggcctcgtcggcttgagtagtggcagcctttttcctctcttctctagcgcttagacgtccccccatccgattcggcgcgagccgggtagacgcgatccctctttctgtacactcccgccgctgtctcctagggtctccacacttgtaccgttcaacgacagcctgcatcgcatgcctccttctcctctttcctgcctgccagactggaaagcgcccccgagaaaggggcagtcctgtccgtacagagggagctaccacaggctcgacagatcgatgcgagatgtccatgatgatcgagccgtctcagtcgacctcgtcgctgaggtcctcggcgggcgctaggctctgcgacgaggcaagtcgcgatggctgggagggtgagaggggtgcccgagcggccgagggcgagccgacgtgcgagacggcgggcgattcggagccctgccggggcattcggttcgcgagcgcgcgcttgaggaagaccgagagcgccgggtcaatgtgggcgacaagctcgtcaaacttgctgcgcttgtcgggatgctgcgacaggatgcgcgacagctcctcgatgcgctaaagtggtagagcgagaggcagtggtcagctttgaccgttgaggcgtcacagccttcagcaggaccggccgcaccttttgtagcgagtcgcccttgacgacggcctggacaattccgctcatctcttgctcaacgtcgtctgcgatggcgatctctgacgtcgcctctggaacgctgaccggcgctcgcctgctgtctgtcgccggcagcggcgattgaggcgcctcttcacgttgtgattgggaggccggagccggctcggacgcagcttgcgctgtttggttgactgcgaaaacgaaataaggcgttcgggcgagctcagatcagctcactatccgcgggtcgtggagaacaagaacaagccgaagtgacgaaccgaggcggaaaatgtaagcgtaggcgtgtgtgttctcgggctcgtcaaaggctgcgctcagctggtcatagacgcgctcgccgccgtatttggagacgacgtgctggatgatgaccttgaccgtccggagcggcatgtcgccgagcggcacgctcgtctgcgcccgccggcgccactcggtcggcggcagcgtctgtaggaagttctcgatgatgcggaggagagcgatcgggtcgagtatgccgtcgccgaggtcgtcctcgacgctgcgcgcgcgcttccagatgcacttgaggatgagctcggcatgcttggcctgacgcgaggtcgcaagcgtgccctcgtcgacaaagctggttgttacccgcttgaggaggacaaagagcgcgctgcaaggtggggaaagagaataagtctcggctacgtgtaagcgacttgtgcgacttgacgcacccgaagatgatctcgcgtttgccgccgttgaagatgcggaggatgatcatgttgaggaagcgcgagagctccttggcgtctatgagaccagggtgacggtcagcctctgattacttgcgagaaagaggagtgatgcgcacctccagtcgcgtcgtccgtctgtagcagtcgcgacgtcagctcaaacagaagcgcctccatgtctgcggcgtcgacctccttgagtagatccgggtggtcgcaaaagttgttgagcgtctggatcaagtgcttcgccaggcggaaccacggcggctcgcccaggtgcgacggtgtgtcgaacacgagccggatctgcttgacaagggcctgaacaaggtcgtctaccgagccctggaagcaggcatgctgcgtctccagcaggcgttggacgcgcttgaggccgtcgaccgatcggctcgggtcgctagagaggatcgaccggatggcctggaccgcctcctgggcgctatcaccgttcgatgatgactcctgcgcagccgacgagccgcgaccgggaagcggagcaaaaagctgaccggtgcgagccctggcagcaggtgccggcgcagactcgctctctgcagatgctggcggcagctgcgaagttgatgccgccgactgccggggctgcatcatcgacaccggacgcgatgccggcgcgccaaagcgggggatgcctcggctgggcgtcgccgagccgtttgacgccctcgggctgagcgcagctttgacgggcgaggacggaccgggtttctctggcgactcggcccggctcgagctcgggcgagcgggcgcaggcgaggcaggcggtgccatacgcgagaggcggttggcagcagcaggcgagccgatccggccgatggcctcgccggacgccactcggctgaccgggttcctttctagcggcggcgccggaccctggacgtgcttgaagcgcgcctccatcgcatcgcgctccttcgacccgacctttgcaaagtcgaagatgccgtcaccagccgtcttgtaggcctcgctgtgggatcgggggtctggtgagtcaatcggagatgtgctatgaggccaggagcaacgcaccccaggacgtcgagcgcgccgttgcgaatcttgccatcgccgtcctgaaggcagcggatgacggcggcgaccgactctttggtgagcgtcgtctccgtcccgatctgtttgacgatggtcgtcattgccttaagagcctcgacgcgtgccttggcgttcttgagcggcaggccttggacgacgaggacgtgaaagagcttgctcgccgcaacgacgtagcgcatcttgccccgaaagaggtcctggatccgcgtctggaacttgggatcgcccagctgagcgtcgggagcgtccggtcagcggcgaacgtaggcagcagatggcctgagacgcaccttggagatgagcgtcggcagcaggagatgcagctcgtactcgtcaaacgagtgccggacggacgaggccggcccgctcgaaaagtcgtcgatcatgtgctcgacgagctcgatcgagcgcgagatggcctgcgtgttcgagtcgtacatgcggatcgcggcgtacttgaggatcaggtcgaggttgcagatgaggctctgccgaagcgcctcttcgtccatgccgaagcggtcggcctctcgcgccatgtcctggaagcaggcgccaatcatcgcaatgccgttgacaaagtcgaccgaggcgttgtggtcgcggctgaagagcagcgagtagagctcgggcgaggcgtgggcctccatctggtttgcgaggagctcagtgtggaacggctcgaccttctcgtggaagacccagcgcgaggcgtccttcttggcccgggccgccttgagcgctgggtcggctgttcggaacggcgaactggcccggtcgacgacattggacgccgcgctcgatgcccgcgacgacgtcgccttgcccggcgccatcgagagcggccgcttgaggccggtcggcttaagacgggagggtccggcgtcctcttccaatgagctcgtcgtcgcccgcgacgaaggtcgctgcattgccgacatggccgaggcggccggcttggggatcgctcccatcacgccgcgccggacggggggcagaccggcggccgctgcagcagggagggatcgcttgacgggtgaggccgcgccgccgttgcgaacaacaggcgccgactggttggatgaggctgacgagagcggccgaggcggcgaggcggcagcggaaggtgcagcggaagaaggggccgtcgacgtcaccggcggcggcgctgcgagctgagcggcttggatgatggggataatcgtctgccggactgccggcttcaagcccgacgtctgctcgagcgcaaagtcgacgccgaccgaggcgacgacgagcgggaggagtgctgaagcattcttgcgaacgtcggcgttgcggtcctcgacgcacgagaggagcggtttcatcaccggcgttaggtcgacagccgtcgggtcgttctgctgacaccactcgagcagaaaggtgaggagcgaggcccggagcagcggatttggattgtcgaggctcgttccgaagctcggcaccattaggtcgatcccgccgcatgcagccgcgatcgcgccgagcgtactggcggcacctgcccgggtcggcgccttctggtcggccagaatggcacagatcggggtgacaaagggtttggcatgcttctcgaagggcctgcccatgccggtggcgatcttggaaatgttgtcgagcgcgaggagcttgaccatgatgttggtgtcggccaggcggcctttgagcgcagacccgacctcgcctgcaaggggtgcaagctacacgtcagcgaccgtcctccctctgagacctcgagctgcagaagaactgaaacacgcacccatccccggcttgagccgcgagttggcctggaggatgcctgcgagcgtctccattgcctccttgcgaaccttccaattgtcgcttcgcgagccggcggcgacgctcgtaccagcaacgattttatccaggtcgacgcgcgggatcaagtcgttgagtgcatcggccgctggcgttccacccttgccgccggcgctcggagcaacgaccttcaggtcggcactcgtccgcgtcggctccggcgggctttggccctcgaccttggcaaactccttctcgatcgtcgccagcagttgcggattgaggtcttcgaggaaagacgaaatgtcggtgccgacgcagatcttgaccgtcaccatcgccttggtcgcgttcgcacggacggtcgcgtttgagctcttgaggttagtcttgaggaaatcgattagcggccgcatcgcgacacccgcggtgccaaagtcgaggagtagctgattgagccagacaagtgcgtcggcctgcgtcttgggcgacttggccttggtcagcggttcgtaggctggcaagtcgaaccaaagaaggtcagcgtcagtcaaagcatggtggccgtcacgggcagcgcaccttgctcgagcacaaaggccagggacgtcttttcggcgaaggcggtgagggcatcgcccgcaggcttcttgagcttgatgtcgccgagcttctcggtcaggtggccgatggcgatcgcgatgcacgccttggaaaaggtcggcgactgctcggccagcaggaccatcatgccgtagatcttggacgagacctaaagagcgactcgtgatcaggaatgaggcctgaagcagaatgacgccagcgacgcacctggaagttcttctcgctccaacccggcaccttggcaaagaaacggaagaagacttcggcttcgagatcgctcgcgtggccctcgccgagccaggccgtcatccggtcggcgccttcgagtcggagcttccaattgccgtcggcaagctcggcacgcatgtcggccgggacaccctcctcccagcgcccttgcgcatcctcggtcgtagacttgtacttgaacggctcagacgtgttggttgtcgccggcgcctgggcctgggccttcgccgaggcagcagcggcagcggcggtcggtgcagccttcttcggtggaggtgcgacggcagcgggaggtttgcgcgcctgggaagcaaaagaaggagagctcagtgacggcagcagctctcttcgaccaccatactcgcgtgacgtacggctggcttcgaggcgggtggacgagctgcaggctttggcggagcggcaaactcggctgaaaatcctgacccaaagccaccgtttgagtcggcggggaactcggagccgaatccagtgccgcgcgaaagcggtttgggctgcggatggaaagcggcttcgtcgtcgtcgccgccattagcagcgccaggcgccgcctttggcttgaggctgacaggctgcagacggaggaagagcagtcagcccaggtagtctgctgcaatcctcgaccgcgtgcagcataccttcttcgcaggcgccctagccgtcgcggcggcggcagcagcaggtacaggtcgtccaccgccaccggccgcaccggcccgatacttgacctcggccgtgtcgaagaactcgcggaccttggtcttgcgcaggtcatcgagcccctcgagcactggcgcaaactggcgctcgccgaggagcttcatcatcaggcccaggctttcggcgctcgcggcccggacgggctcggcagagtcgcccgtgcagatggcgagcgcgtctgagagcggcttgaccgagttctttgatggtgcctcgcgggtgctcttgagcgaccggttgaggaagcggagcgcgccctccttgacctgcggattcttgcttttgagcgagacgagaatgtcctcgacgcactcattcagactcgactgcgtgatttggaggaaattggtcagctggctgccagtcatttggtgatcgaccgttacgcacgctctcgaaaacggcgtctagggcggcaccgagcgcatccgttacgttggccttgcgctccttcagccgctcgagcaggggcgccatgacagttgaccggtacgtgccaaaggccgggccgagacccctgccgaggccctcgagcacattggcgctggcgatgacgacgttgatgttggcgtcgctcgggatgcgtttggcgatcgcctggacatgcgggctgaagtcggcgtcggtgagcaaaggcgcggccgtgatgagggcgtgcacggcctggagcgtgtcgagccggtccttccacttcgtcgagccgagcatctcgaagaagtcggccgggatcttgggcaggatgtcgaccggcggaggcgcatccggctggatatcgagcggctcgtcctcttctgcctctgccacagcaccgtcgccggcacccgcaccgccgccagcaagctcccgctcctgtgtctcgcgctgctgcttgcgcgtcgcacgagacggctgccccgagccacctggagcaagcgcgttgaaagactcggtgagctcagcaacctggatcggcttgaggtcatggagaaacggcgtaagagaggggccgaggaagagatgcagctgctggacgagcagcgtgccctcggaccggacgaccttgtcggtgtggccaaagatcttggggatcgcattgagcaggggcttcgggttgccaatgaccttgatcccgaaggcactgatgagtgaggtcagaaccggtcagctggggcactagtaggtcgcttgccggaccgtacgcacgcgacgatttctcgcaggcaagtgacggaagactggacgatcttgggctgtttggcctccagacctttcaagacgtcggcctgaggtgggcacgatgcgtcaatttgacagccggaagagcggaagccgaggaggacgcacgacgaggccctcgcccgagttctcgacctcgatccaaagcaggccgagctcgatcgccttcagcttcaagctcgcccgggccgagccaaagcacttgtcgacgaccgagggatagacatctgcccgtagcctgcgatggaggtgggtgatggccgctcaggtcaacacggcagcaccaaaggatgttgcagctggcgcaggccgtcttgggtcgctcctgagccgagctcgaacgcaccttgcagacgtctcgccgctctcgcggaccaagctcgacagcgcctcgacgcccttctcctgtgcgacgacgttggcgtccgtcacccacttcttgagcaggtccggatccctggtgaatgagcgcaaggtgaggtgccaggcagtcaggacgcgacgagctcagctcgactcggaaggagccgaggccgctgggcaggacgcacgagaggtagggccggaaaaaggggtcgtcatccgacgtcgtcagcgcaaacttggcgattaagtcggtgtaggcggacaggcgagccttccagttctgcgggtacgcagggaccgagccggtccggttgagggagagtcgacgtcgcgaggtcagcaccgggagcagtgacgcagctgagccagaggccatgtaacggaccttgtggacggatcgttctggcagtgcgatcttggagaagtcctcctcggtcggaggtacgccgtccatcctggcgagctcaagaggctgaggggagagaggaagcggtcggaggtcgagctcccgaaggtgcaactgaggcagccgagcgagcgcgagccgctgtgattcgaaccgtgcgagccgagagggtttggccggctggtccctatgcgagctatccgactagctgatgaagtggccttgatgacgatggccgggctccggcacgaggttgaggttggtgaggagaggacgagcttgggtcgagcttcggacgacgcgacggccgcccgcagcgtcaacacgtcgaacggagctgcagactgcctcgtgccgcaatcctccatctcgctctctcacacatcccgccgagcatgtctctcatcgacacgggcgaccagatcgagcgcatcctcttcatttgccgcaacgtcaagggtgagtcgcacggcaggtcgacacctcccgcctgcgcgcgcgcgacagagctcgccgagagctgacgacggaaccgctccctcgctctcccagtctacaaaatcccgccgcgcccgtcgctcagcggctggaaggctcaggactggggggagaactcgttcatctgggagggccgactccgcatcgtcgaaagcggcaacaaggccgtgctgaagctagaggtccgtcgccatctccctcccagctcctggccaacagtcaggcgccgagcagaccggttgagctctcgctgggcaggaagccgacctgtccgccatgggccggcggagccgtgagatcgtactgaggctgactctgaactgcccatcttccggcaggacgccaacactggcgagctctttgcgacgagcccgtacgacccgccgggcactaacgtcgagcccgttctcgactcgagccgatactttgccgtccggatcgtcaacgagcagggcggcaaggcgacgatcgggatggggtacgttctcctggtagagcttggcttgcgtcgtcctatgctgacgagcgtgacccttgtccggcctctgcgcgcgcgcagcttcgaggagcgtggcgaagcgttcgacttcaacgtcgccctgcaagacttcctcaaacacctctcggccccgtcaccttcggcctcgtccgcagctgcatccgcgaagccggccgagccgaaaaaggacttcagcctcaaggagggccagacattctcgattgcgatcccaggcggaggtaccggcggccgaccgcggcccgcgaagaaggaggcgcctgccggcggagggggggttttcgcgctcccgccgccgccaccgccagcgtcgcgccggcgcgagtagagccgccttgagaagggtagagagggctagactctcttatgtggtctcgttgcggacgcccgctttaaggactggaggggggaggggggcaaatcgcgccggttcgtccgactcctgcaggctcccgactgacaccatcaaagcctgaaaggcattctctcgacgacgcacttcagtatcgtctaatacactcgacctcggcgacggcgcgcccttcaggatgcgacaggttgcgttgacgaccggccgctccgcctgtaagtcgcccctattcccctcaactctcgcttcgtcaagtaagattatccttgctgacggatgaactgtggttccttgcctacctccgcggccttccagatgtagcctgcccctttgtcttggctgacccctggccaatgctggctgctcgtcacgctggcgtaaaggtcagtcttacgccgttacgcccggcgcaaccgttgagccgagcgccgacagcccatcgcgagtcgtcgacctccgaaacaggcttccctcaacgccatcctccttcctagcaacctccgcgatggctcctattcatccttcgatcaggccgctgctttgcaacgagctcgtcgctctcgtcgaatcgcagccgatgccggcacccttcaagagcgccgccgactggtcacccgagctccggacgcgacgaggcggcggcgggccgatgggccgcgatcccgccgaaggcgtcggacgctgggagggttctatcagctggatggccgatcccgccgaggcgaccgagggcgagtggacggtcggtcctggcctcggtcggtgtgacgttggcgtcttctggcccgagaagctgccagcagacggttccaagtgcgtacagcgaccgaagctgcattgctgcaagcctcttgctgacgctgctgcgcgcctctgctcgcaggctacccgtcttctgctacattgccggcggcggctttgtcttccctccgcctccaagttcgtccagcgaccgaagctgcatcgctgcaggccccttgctgacgctgctgcacagtctcgtcgttcctgacaagaaccgctctcaacacgccctgcgtgcttgtcatcccgcgcccgagggtcgctcccgaggattcctggccggcgggcgtcgaggacgactggaacgtcgtgcgctggttgctgaattgccgcgcgcagaacgaatgggatgggcttggcctcggcgtcccttccgaccgggtcaattggtcgaagattgcgcttggcggcgcaagcgctggcgccaatgtcgttcgtctccttttgccctgtcggtcgtctgcctcggtgctgatacgtctctcgctcgcaggctgccatcatagctcaaaagctcacgcgacccgcattccagggcttgacaccgctcgctcagctgcttctcttcaacgccgtcctcgacgggacggcttcgatcgacagcctgacgtacccaagctggtcgacaaatcgacactgcccgtgcgttagtcgagtgcctctgcccgtctcgactactgcactgacgccctgcgcattcctccgatggcagcgaccttcccgccgagacgatgcgcgccttctggtcgctctatctctcttcctcctcgtcaccagactggacgcaccccttgatctcgccggcactcgctccggacgacgttctggcaaggctgccgaaggtctggatctgcgagggcaacgccgaccttgtccgagacgaagggctcgtccttgcccggcgcattcgctcggccaaagcgctcgccgaggacgacccagccgtccgagtcaaggtctacgacggagtctcgcacggctacacgatccaggatgcggtgcgtgacatgagcatccaatgaagcggccgctccgagctgacgagtgacgcgccttgacgacgcccaggtgctcgaggtggggcgcacgtacgtcgaggatatagcgcgggcgctgcaggagggattctgatgcggcaagcgcttttgtgggctcctgtcccatgaaaggctgcccttgggtcggtcgctggtgcagggtgtcagtgcgaacgctcgactcctgtcgcacaccacgctcaaacggaatgaaaaggtcgcatgttcatctcttcttcttctcttcttctcttcttctctgcgtaaggctgagctcggcagcgctcggccttgcctacaggtgcggcgggaacgagcacccgtcgcggtccttgaccccgaacccaagtctcgtagctttcccagcatcttcttcagcccagaacggtcgaggggccgttccggatcgctctcggcttcggagttcgacttctcgtagccgtccagcgagggatacagctcgtggtcgggcaggttgagcgtccgcagcgctgggaaaagcgaacggttcttgatgcgatcggcgcaaaaggcgtcggcgaagtaggagccgggtgaggacgcgccgctttgcgccatcaattcggagggtacgcagcgtcatgggtattaccaccagccagaagaggtcgctccagtcggaaacctgtgggccgacgatgaggtgctcgaactggtcgaggtcaaagtacttgtccagcgggattgacaacagcggcacgccggcgcccgcgatggtaatcaagaggttcgagagggccagccgctgctcgagcgctggagatgcgaggcctgcgatcggccagaagaagacccagacgtctttgaggttcggcaggttgggcaggtgcttgacaagcagcctggtgccgctctcgtcgttgggcacgcgcaggcgtcgaagcagccctccatgagcggggtaggtgtcgagtgacgaagaaatttttgggcgtcctatagacgcagattgtcgcagaggagcgactgagcttcagcctgccagatgtcaaagagtggccgaatgtcagcgaacataacctctgcgacgcaatctgcgacgcaaaagcgcacaaggcacataccccccatgcccgcgagacaagggaagccgccatcaggttctccctccgagcctgaagaggttgttcagcctcccacagaggctcgtcgagggcgcggatgaaagggatctgcagctcgagggggaacgtgcgcggcctggcaaaggtagaaacaagcaagacaggtcgagaaaggtcagcgccttagtctgagagcgaatgcaggacagcgagaagttgatcagtgataaagaggctcacatgcgaaagacttgagtgagatgggcgagcttgaggaagagaggccggtgcaaaaggagctcgtcgcgggcgggaaaagaccacgttgacttgaacacgagatgctgcaacgaaagaacagaggccaatgaggtcaacgctgcgtcatctggtggcgagctctgcttgagcgcgcctgctcacgagaatcgagagagtgagaccaatgcaaacgggcaaacgaggcggagaggagtcgagcggtggatgaggcggtggtggctgctgaaggccatcgagcgccgtcgtcagccggcagacctcagtcttcaggcggacagagttgacagacctgggacgcgaagggcagcagcgtttgctggttgaggacaggtcgaaggtgggcgtcagagggcaaggcggaaaagcgagaagctcctccctttcaagcggctgaacgaagcctgctgcgcgccgctctccctttgtcttcatctcggccgacccagaaggggcctgaccgcggcttgaaagaacgacatggcatgtagatctcaacctgctggtcacagctactctcacgtccaagcgtcccgccagggccggccttcggcgtcgatgacctcgaagccctcggcccgtagcgcacgcgccatctctcgcacgccccggacggctcgcatcttggccgactcgaagtggagcggttgtagaaggtctcgccgaggaggccgaccgtctgcagcgcggggaacagccgcctccgtccggccgctcgcgccgccgggaggctggcctgcgcgcagagggcagcgacaaaggtgcggaggctgtgcgcttctggccatcccggctggccaacgagggagagcaaatcgatatcaggcgcgttgtcctcgaggtccgataggtcgggtccatagctgaccgggacgagggtcggcgtctcaacggccgccttgtcatgagccgcgctcgccatcacggcgcccagaccgctgctggccgagtcggcggaggctagtgtcggctgcgccgccgactcgtgctcgctctcgctctcgacggtccagacgtcttcgtcctcgtcatcgccactggaggcgtccgagacgccgtcgaacggcgcgtcagattcagactcttcggccgccctaaaggcgtcctggacgacgccaacgacgagcgtctcgagggcgccgtgcggctcggcgaggagcggtcgaaggtcgctgttgagtcagaccggtccgcggaggttggggaagtcgaccagaggattgctcattggcagcgaccccagctgaagaggcgtcactgtgagattcgtgaggccctggaacctggcgagcgggatggccgacacgaaccggctccaatcactcgcgtgaaagcccttgaaggtgagcgaccgcaggtgttgcccgtcggtccggcggaagaaagggtcgaagttgagagcgagccagtgcagacaagctcgcgcagttggtcgacccggaagtaagcgatgatggcgtcgatgaggccctgagtgatgccgctggattggacgtgcagcgtcgcgagcactggccgcgcggctccggctgccttgacggtcaaaggcactgagtaggttggatcggctgtcaccgcctgcaggagatgcaggtgcttgatcaggtcgatagcgtcggcgtcgagcgagaggaggatgacccggcggacgagcaggcggagatgggcgttggcctcgagcgcggcccagaaggcctcggaccgacccgactctaggaggtacgagacttcttcgaagaggaaggtctggcattcggcctatttgacgaggggaggaagaaaaatgtgtcaggagcttgagccgggcagggacggcgccggaggaggggagacaggggctgtcgacgcacgcgccaatcggggctgacgagggcgcacgcttgaaggagcgcaaattgtgtctttcgtgagcgctcggcggcgagatgggcggcctcgtgtaggatggcgagctggagctcgagcgggaggatgacggcccggggcaacgaaatttgatgatgcgaagagcgggggcggaggtcgagaggccgacgagctcagtcagtcaacgatcagccgccggtccggctggttccgaggacgtacgacgaggagtggaggcagggatggtggtgcttgtggcgccggtggacctgctggagaagggtgacggcagagggtcgaggtgggtggtgaaggagcggacggagcagggtcgcgcgacgcgacccgacgcggcggcggtgagcccctttcttcgccatcggccagacgcggcgtcctcagcgtcgcaaagaccctcagcccgtccattagcaggtcagtcgaaaagcgcggtaggaggaaatggcatgcgtcgcattcccccctcctcttttccgccctgtcaaagcgtccaggccgacaagagccgaggccgccgacgctggctctaacccgtcccacaagcgacggctgaaggccgcactcacgccagccggcgctgctcctcggcgagccgctcatcagcaagcgccttccggcgctcagcaagcgccctccgctcagcctcctcggcgccggcgatccggaacctgcgctcggcatcgagcgtctgctggcgcctctcggctgcctctgcctcgggcaggtcggcgagcaggaggtcgatgtcggtctggacggcgacgagctccgcttcggccgcggcgagctcggacgggtcctcggccgatcggacgatcgaccggaccgcgtagagccgctcgaaggcgccgctgatgttctcccgggcggccgtcgtcggcatcgttgccgagcgctcgaggccaaggttcttctctttggcactcttggccacgagttccgccgattccgttgcggacgcccggccagaggtccgccgacgcgcagcccagcgctcctcacgctccgcaaagagctcctgtacgcgctgcggtccatcctcgcccgcccacgcctcctcaagcgccttctcaaagcgccgagtcgcgagaattcggtcgggcaggagccggagcttctgtcggttgagcttgtagtacctcttgagctcgagcacaagctgctcgcgctccgtcagcgccggcttgcccttgcggatgacggggctcggcaggccaaacttgccggggacaaagggcttgcggatgttgttgtcggccgagaccgggagcgagggcatggccgaccatcgggcgatcgtctcggccacccggatcggccggggcgagagcgacaccgcgtcccccgtgacgagagcgttcgcccagggctcagagagcgccgtcatgtcgtcaacggccgtcggctgacccagtttagggtggaagcgccagctgaggacgaacaacccaaagggagcggtcaacgcgctgctctgcgaaacgcgcagaagggcagcatggacgcactagtatgagcctgcgatctgtcccttcttgccagtcttgccggcctcggcgccttcctttgccggggtcttttcaaaggcctgctggaggaggtgttgggcccggagctttttgaggagaccgtcccggagctgcctgagagacgagggacgcgaagaagaaggagcaaagatgagcggtcagtctcggcgcgaacgcatgacaagtgcgctttactgcggcacccgccctcctctttatcgacgagaaggcagcgagcgtgctttgtcgctgctaaccagcctgcacgatggaccgaatggactcactgctttgagccgatcgggtgggctgccggcgccgtccgctcctggccgggtctgggcgccttgagcttgagacccttcggccaagcgagtccgtccttgagctgcggcgtgagtgggtcgtcgttgacgctgctcggcagcgggaagcgctcgtgaacgagccggtagaggtcggttgtcgttggccgggcgtccgacgggagcgagcgcaagacctcgtagatcatgcgcgagggcgaggggagcctgccggtcgaggacgaggccgacgatgaagcggccatcgagggtccagacgaggcgaggactttgctggcggtcggcatgctggcgtgttgagagcggtcaatgcagagagaggacgacgacgggagaaggcggaggaggcgagggcgagaagggcaaagggggctttccccagactgggcgctggctgggcttcgccgaccagaccggcccctctccctccctcctctcctcaaagccatcggcactcgtggccacgaaagcgagcgagcaggatggctcacctgacccggtcagttggacgacgagagacgtgccatccctacctgtgctgacctgccgctcttcccgcgacagcctcaacgagcgcacgacccggccgaacccgaacgtcggcttcctctccgtcctgtccggcccgggcgagagcgtacgttctcggcatgtccttgggcaggcgaagagggagcggtgctgcagaaaattcctacccctttgacgtgtgcttgatcgagctgacgctaggccttccacttccttcatccggccccctccctttgtccctcctgtcgactcgactgcgcgccacagcaagcgctggccatgatggaggccctggccgctcaagtcaagcgtacgtccctcttttgctcttttctacgaaggtctcaatgtgattttagcctctgcggcggtcatcctcggtatcaggagcgagaggcgggtcttagagggcgaggcgacggaagggggagtggcgcgctggcggcccgtgccccgagagtcgagcggaggacctcgcgacaaccccttcctccctcgaggcggatcaaagctgacacctctgcgtcgtctgtgtcaggcgtctgcgattccgaaggtctgaaggtcaactcgctcgaagagtatccgtacaatcgcgtcttcgccggccgcaattggaacgcgggcgaggtcgtcgagctcgtcctccgccggacaaacgggaccttctttccgacaagctggctgctctcggtcctctgtcatgagctagctcacatccggtacatgaatcacggcccgggattccacaagtacaaccgcgagctgaaggagaaggtcggccggctccgcgctcagggccactacggcgagggttcgtcgcgatcccgctttctgaccatggcccaagactgacgcaccagccgaccttcttcgtcacaactcaggcttctggtcgaccggtcagctgctcgcgactggcgaggcctcaattgacaacccgacggtccagggcgatgtagccgagcacgtctgcggcggcgcccaagcccggcgccggccggtcagcgcgaccaagcggcggcggacgggtctctcctttgcaggcagcggcgtgccgcgcggtgggggtcccagcgcgcacaccggccgtcagacggcaaagaagcgcaagagcggcgctcggaacgagggcgccttcaagcggctgcttgaggcgcagggccttgactcggcgggcgaggggagtggcggggcgagcggcagccatcggctcgacggcggccgggtgctgacgtctgaggagaaggttgcgctctcatcagcgcgcgccaaaggcaaggtgaagggctcaaagcgccaggcggcggtcgtcgacgccgcgctcgggacgtacaagaagcgggcgggtactcgctcggcggccgagcttcgggccgaggcggccgagaagcggctcgcagaggcacagcggacggctggcgtcaagaaggaagagagcgacgacgacgacttttcggacggcttcgatgaaggcttcagcggtgacgaagacctctacgagccgatccccgagacggacgcggcccgccggcaggcgctcgccgaagccgaggcagacgaagacaacgacgacgacgacgaaaaagccgatccctgggctgactacgagcgcgaggtcgcccagcgctgggccgagcgggccgccggcggtacccaggccgcatcgtcgtccttctcgtcgacggccgtaggcccaagcgcaaagggcgagggcaaggcaatggctgccatcgtgcccaagccggagccggccgacgccgacgagccgctcttcttccttaacggcgcgagcgagagtagcgacagcgatatcgagtttgtgcgtctttttgcttcgtgctgatcggccttccctctctcctccctctgcccgccggcgctgactttcctccttctctttctaacgcttctcaggtcggcgagtcgcaagcgcaggcgcccaagaagaccgttaagagcaaggcgaccgctccgaccaagcctgtcgccaaaggacagccaaaggcagctgcgcctgctcagccgaaggccgcgcctcccaaatcgtgcgtgtgacgctcgtcgcccagcgtcaagaatgaagtctccactgactcttgcgtaccgctcggctctagcgccgggttccggccgtcgtgggcgtcgtcgccgccgcctcagtcatccgccaacaccagcaccgtcgttcgcccttcttctccggcgattcctccggcacttgcgaccgaacagtcctggagctcacgggcgagcgccctcctcaggtccgagctcgccgagcggtctgccgagctccggcggcgcgagctcgccggtttgggcatggcgggccgcggagctctgaaccggctgtcgggcgagcgctgagggcggtcaatgacggcctccgcttcaacaaagccctcccggcgctccaaacgggcggccgcttgacttccggccctcctcaactcgccgggcgccccctcggccggtcgcgacctcgcaccgtccggttcagcctcggcctgacacatttaccccatcttgacgaatctcgcttcctccttctactagacggcacgacttcccatcacgctcccttccgttcactttcctcacctcctccactgccgctcacggccgacattcagtcttgcgcagtcggctctttacaccacgtcttttacgacagcctcgacgccttcatcgacctctttcatgcccctctcgcccgccgaaaagcgcagtacgtcgggcgtcccctcttgagagcgagaaggaaatctatctcgtgctcaccgtcgagtcgacagccctccgccccgtccctggcccgggagccggttcttccctagccccgccccagccgcacagcgcacgtcctcgtcttgaccaggatcgacgaccgggtgagacggcccgccgacgtcggcctttgcgtgcgcaggcaagaccgccttctttgccgaccgtttcgccgcccgccgaccgccgcctccttcctttgaagcccctctaaacttgagccgagcgaggaagccgcggatgcgctcgccgatcttcttccgcgctcccgctcccgctcctgagctgctatgctgctggtcgctcgtcgacgctgacgggcttcctgcgaggtcggccgcaggcggggggtggttctgtgcggcgcgcgagagggaggtcaggccgtggaggtagagcattataatggtcgaaccaggggggagggaggagcgggtggagtggtggtcgaagtgagcggtcgaaggcgggcggataccgtctgaagagataggcgtaggtttgtggtcagctcttcgtccagtgaggcaagcagcagcaaggcgggacgtacacggcctgacgctcaaccgcgcctgcgccgccctcccgccccgcttgaccggcaacatcgacctcatctccctcgcgcgccggctgtcgtccctttctttcgcgttcggcgggccgggaggcgttccagccatagcggcgagcgcgtagggcaggacggggagcggaccggtgccgagtgaggcttggacggcgagcgtctcttggacgagctgccagtggaggaattggtcggaggcggaggtccgggcgagcggtaggccgtcagccgctggcgcgagggcgcggggacggaacatgtgaggaggaggccgagccgacgtacgtcctcatcgtagcctccgctggctgcgagcgctgcttgccggagcgcaacctgcagccgggcgaggtcctcggccgggcttggcacagcgagaggagccgcctcggagggctcgggcgtctgccggcggcgagtcaagaaggctgctgggagggctgggacgggtgggacgtcgtgtgcgacggaagacggggaagaagagctgtcgagcgggcgagctgacgatggagtccgggctggagcttgagctgacgcggtcgtctgcgggagaggaaggcggcgcgagtagttgagtgagcggccggtgaagggtggctggctcggcagcgctcctcctcgagagtggtcggcggaggtcgcggccgtcgtcgagagcgacgacgactcgggcggcatggcgggcaggtggtcgtcgacgagaaggacctcggtcggccttcccctgaccggcggcccggcctctatgcggaggcggacccctgtcgaggtgacgtgaagggcgacaggagagggtaagatgtcggccggcggcggccgaagtgggtgaccctcccgactggccgtcagccggtgagcacgagaagatgagagcacagcagcgatccgcggtcagcgcctctatcagtcgggccactctttctctgtggctgctgtcatcgtcctcactgaagatgtgtactgggcgctgctgcaatccaccaccttcgggcgggcgggccgactctgagaatcatctatcgctgccgtctaagtgtctggcgcggcgcggccggggcggatctcccttcttttccttcgcgccgcttcctctccttctccccaccctcccgtcctcctccttctcccttcttcatcatgcacccctcccgtggactcgcccggctctcgaagcaggccgccaaggccaaggctgcccagaaggccttcatggccacccaggccccgcgcgtcgtccggccctcggtcgtcgcccccgtgatggccggccgccagcagaaggcccccgtcgccggtcagtccccactcttgtctcttccggtggggcgcttgtcggcgagaataagggtagctaggagagctagcaggacaagcaggcggtcgctcttcctaggtcgaggcgaggcgaggtggcgacgacaaagggacagcctcgcgggccgggctggcagatgggctgagctcggcccatcgggcggcagctcgaccctgcgaaaagcaccttccttgcctccttctgctccgcgcctctcttgcacaggcccggtggaccctcaccgacactgcttggcctctcctggcgtgctcgacttccctgctcgactcgagccagagaggagacgcgccaggggctcgagcaggatcggccagtcggcgcggcgcgcgtggcgtgacagaggagtctgcgactgccctgcctgctcatcctctccttcacccacatctccgtcctagcctctgaaagccctccgcgacgccatctcgagcatgcagctgacgatccctattttctcccgccttgctgctgccgatctgcctatcagctcgctcgtacgcgaccgagaccaaggtctccgccggccaggtcaagaccgtcatcggtgccgtcgtcgacgtccagttcgagtctgaggtgcgtctgcgacctgccgttgcccttgtcgttccgttttcgattcctgactcgtctcgcgcctcgcctcttagaacctcccccccatcctcaacgcccttgaggttgagggcttcgccggaggtcgcctcgtcctcgaggtctcgcagcacctcggtgagaacacggtccgcaccatcgccatggacggaaccgagggtctcgtgcgtccgccgtcgtctctgcctcccagcgctctgaaggttggcccgctgacgggcctttctccgcccttttgcaggtccgcggcaccaaggttgtcgacactggtgctcccatcaccatccccgtcggccctgcgtgcctcggtcgcatcatgaacgtcattggcgagcccattgacgagcgtggtcgtgcgtcctctctttgcttcccgcacacgtgcgcgcccgcgccctattcgtctgcaggcgctgatcgcttgctcgccgccgccctcccctagccatcaagggcgtcaagcgtctgcctattcacgccgacgcccctgccttcgtcgaccagtcgacgacggccgaggtcctcgagaccggtatcaaggttgtcgacctccttgccccttacgcccgtggcggaaagattggcctgttcggcggtgccggagtcggcaagaccgtcctcatccaggagctcatcaacaacgtcgccaaggcccacggaggttactccgtctttaccggcgtcggtgagcggacccgtgagggaaacgacctctaccacgagatgatcgagaccggtgtcatcaagtgcgtctctcggcgttctctcctcagcgcaaaggcctgccgtcgctgaccttcttttccccgcgctctcctagccttgagggtgactccaaggtcgcgctcgttttcggtcagatgaacgagcccccgggtgcgcgtgcccgtgtcgcccttaccggcctcacgatcgccgagtacttccgtgacgacgagggccaggacgtcctcctcttcatcgacaacattttccgcttcactcaggccggatccgaggtctcggccctgctcggccggattccctcggccgtcggataccagccgacgctgtcgaccgacatgggtcagatgcaggagcgcatcacgacgaccaagaagggctcgatcacctcggtccaggccgtctacgtccccgccgacgacctgactgacccggccccggccacgaccttcgcgcacctcgacgccaccaccgtcctgtcgcgtggtattgccgagcttggcatctaccccgccgtcgacccgctcgactccaagtcgcggatgctcgacccccgtatcgtcggcgaggagcactgtcagtcgccatccgagtctctttgtgtcggttgatctcccgtctgacgcgcgcccccgcccgcccgcacagacaacatcgccacccgcacccagaagatcctccaggactacaagtcgctccaggacatcattgccattcttggcatggacgagctctccgaggaggacaagctcaccgtcgagcgcgcgcgcaagatccagcgcttcatgtcgcagccgttcgccgtcgcccaggtcttcaccggtatcgagggcaagctcgtctcgctcaaggagaccgtcgagtcgttcaagcagattcttggtgtgtccaagcgatctctgtcgggggccggtcggttgtcggggcgcgcgtcagcacttgtgcgggcgtccgcgccccggccgaccttctgccgtactctactcttcgattctcaagctgacgacgcattcttacttctgcgctacagacggcacctacgacagcctccccgagaacgctttctacatggttggcggcatccagggtccgtctcatctttgctttggtcgatctgtcgccttgaggcacgcgctaaacttcccccgctcgcccttctacagacgtcaaggacaaggctgccgccctcgccaaggagctgtcataagcttcttgacctggccccctctcttcctcgtctcgagcagagcgggtgagatgacgcgtgcggtggagagcgttggagtttgtaaaggcggcgctttgggctcacccttgcggcggcgcccctgcgaccgagcgaaggagtttttcctcccggacaatggagtttctttcagaacgaccggcgttccgtgagctcgagcaggggtgcacaggaggagggaatggatggagggtagcgccgtccggccgaggcgggacacgtcgcgatctcgtcgcctccctctctttcgattgtgtccgacacggccgctcgtgctgcatctccgacacattgcagctgcccgtcttcacgtcaggactggctgtcgttgcgccgagtctcgccgttcctgctcgaggagtcgttcgtcagggtcggttggagctggaagcgatcgcaaccctaagttttggccacgcgcgcgcgccgaagggtttgccagcgcagctccgcccgacttcccttgcctaccgtcgtcactccaacccctccttttctttcctcaaggttcccttccagtaagaaaaatggtgcgttcctcgagcgcccgtctctgggctgtctcatcgtggtatcgtgctgccggtcgagcgggaactgcctggcgggccttgtggccggcttgaacggcttcggagctcaggtcggacgagcagatggctggcgagtgttcctggccagacgtcggtcggtcgacagctcactggcgggttcacaggagcaggccagctgcagctgttgcgtcgcatgcttcctgcgagctgggcggcacgacgagcgcgacacctgaacgagccgaagtctgcgaacgaggcagctcgctgacctgcctttcttcgtctcacaggcttccactaagaccggcggcaagcagcgctctgctctccaggacgttgtcacccgggagtacaccatccacctgcacaagtacggtatgtgtcgatcgctctgctagcccttgctctgccctccagccggctcactcgttcctttcgctccctcgcagtgcacggccgctccttcaagaagcgcgctccctgggcccttaagtcggtcaaggagttcgccaccaagcacatgggcactaaggacgtccgcgtcgaccccaagctgaaccaggccatctggggccagggcatcaagaacgtcccgaagcggctccggatccgcctcgagcgcaagcgtaacgacgaggagggcgccaaggagcggctctacacgctcgccaccgtcgtccccggtgtcaccgagttcaaggtgcgtcttcctaagcgccgcgtgtcgttgctctcgggcatctgctgaccggccgcctgcgcttgcgtcactgtctcctctagggtctccagaccgttgtcgtcgacgccgagtaattctcccgcatcaccggcctctacccgctgcccaaccccgcggagtagagctgcattccctcccctgcagaattatgaaaccttcttacgccatgaatcctatcctctccggtccgcctcggcggccgggggggatcacggggacgagcgagttgccaaactttccatagagccccatccctccctcccccacctccaacccgcccacccgcctacttatgtcgccctcgccctcggtcgcttcgtcttcctcctcggctcatgcgccattccgcctcctcgcgctcctcacgcccgtccggaaaccgtcgacgcgcgccgtccggtcgctgtcgatctctggcccgctcgtcggcttctcgccgccgcggccgccggatccgctgctcgacaccgccagcagcagcagcccgcgcccatcggcctcgctcctccggcgcaagcagtcgtcgccttcagtcctcccgtcgctctcgccgccgagacagccaccgccggtcccgcttccttcgctgccgctcaagcccgcgcccgagctcgacgctaaaggccgcccgcgccgcacccgaccgtccgccgccgccgacaagccgctcgctcctctccctaccctccctcctctcgccaacctctcgccagcgacgacagcagcagctcgagagggcccagacgcagccatgacgacctcggcgagcaaccacatgatgaagaactcgaagcgcggccggccgttcatcaaggtgtgtcgtgcgcagctcccatcaaagggagagatgcagcgggggcgggttcccgtcccgccactcttgccctcttgttctcggcctcagtccccccccccccgcaggacgacgctgacctcccctgctgcgtacacgcccggcaggacatccatgacctcttctcgacgctcatcgtctcgctcgacctgacgagccatcggcagttcttcaagagctatccgaactcgttcacgacgtgcgttctttgtttcctttgctgccctctaatgccgccctcgctgaccctgctcgcccccgatctcaaaacagagacgaggcctgccaaaacctctcgtccctcaagttctcgcagtcgaaccgctcggccgacccaaaagatccggcgcggatcatcacgacgacgacgacgacgacctttacgatgacgcgcgacatggccaaggacatgtgccagcactttatggacgcccggctgattgagaatgcggcggacaaggcgctcggcgtcttcaaggaccggggcgtctaccagtgcacgccaaagggcctccacatgcacgtcctcccacgcacgagcgttctttgctcgcccctggaccgagactaacctcgctttttctctcctgcctcgcagcctcgagcgctttgtcgccaagaacggcatctcgcaccagcagctgctcaaggtttttgcctcgcagcccatctgcatgaagctcctccacctcgagcggcgctcggccgacgacgagctttactcgtcccgccaggtaatggagatgctctggaagcgctttgccggccggcagcccaatattgcgatcgccgcggggacgaacgagccgtcgacgctctccctcccgggcaacggcagcagcggcggcggcggcgcgtcctcgagctcggccggtggcggcgcgtcgaaaggcgcgctcgccggcgggccttcgaccgagtcgatcgaccagacgcaagggatcgccgtccgggccttctcggagcgcatcaagggcaaggcccagtcgtttgaccacgccgtctcggcgatggccgtcgtcgactggctgctcgactttacaacgatgggccagcgcgaggaggcggtcgagaatgccgcccagtttgtccgccatggctggctcgaactcgtctgcgagaagggccggatcaacaaggagacagcgctcatcgtcaccgtccgtgggcgcgccgacaacgggtctaaggtgcgaccatctcttgcgttgcttctcgtgggacccgcgtcggctgacctttgcgcttctttatcgacgcagtccgagggcgagttccgggcgaccgataaggcggtctaccgaatcaccgagctcggcgcccgcgtcgctcgctggggcggccggtcttcacccccttcggctggctcgcccgacccgagcgcagcctcggccaaggaggcaccgcatgacgagcgctaccagggcctgcgcgtccccggcggcgggacgctgaccgacgccgacgccgagctcatctcgtcgctccggctctcggacaaggcgcgggctgagtttctcgaggcggacctcaagacgtcgggcgggttcaacgcgctcaaagagtcgcacacgaccaagctccagcagattctggaggagcccgcactccggagcctctttcgcgagttcctccgcctcaacttttgcgaggagaacctcaacttttggcaggacgtccaggactttaagaagcgcttcagcacgacgtcgagcgcggctgcgggtgcgccgggcggcggcgacggcggcaagggcgtctcgtcgacaatggagcgccacaaccaggggctcatcgcgatggccttcatcatgtgcgctctcttctcgacctgcttgcgctctctgcgcgcggagctgactctccctcgctcggccactccaccagctacaacggctacctcgcgccgcactcgccctccgagctcaacattgaccacaacctccgggccgagctcgtcacctatgtctcaaacaatatccccgaggcggccgcgctcgcgaaagcacgagcgaacccaagcgccgtcgttgacggccagggcagtccgtcgggcgccgacccgtcggccgtcacctacacaatgcacgcctcgcagctgcagacgatgctgcgcatgtacgagcgcatccagacgtacatcttccggctaatggcgaccgactcggtgccgaaggtatgtaacctgccacggccgagtatctcgcagctgacgctttgtctctcggccttccagttctgcaagacggaacgcttcctctcgctcatgcgctccgcccagtcgtcctattctgactggccggacgaagccagcaacggcatcaaggcctccaacggcggtggcggcgggcacgtcacctcgagcccgtcggccgaaagcaatccgtcggccaagcaggtccagcagcgcgaggaggaggctgaccgggcggcaaaggcctacctcaccatctctcaggcggcgaacgaaaaggcggcagcagcagcgaaggcggcagccgtcgctgcccagtgaggtcagaccctccttcttcgcaccctctcccttgtgatctcatttcagatttccctccctctcatctgtttttcggttctttctccctctcgcacttgcacttcccttcatcgcacctcccacctgtctctcccttatcgcaatggtccttgctcgaacagcacaccagacgtgtgacaggactacaaggctctccttcgcgcaagttagaccatgaccggcgcgaagctcgaagacgggcaaatcatgtggatcgcagcgacagccagagagcgagaaggaagccgaggcctgtaaaagggcagtgcagcttccgtcaacgtcgaggaggatggcaagagaccttcagcagacagggtcagatggacgtccatcgagtgctcgggcaggccagagcgtcgtcgagcgctcgcatcagaagactgtgatggcaagcaggtcaccaacgaggcacggtcgcgaacggcaagcgaccaactctgaggctcgtttccgtagacaaagttgaggccgcgctcgtcgtaggaatggacccgcggccagccctctccccgcagctccgcgaagacagtcatgcggccgggctcgcgctcgacccgcttgagcgagcggaggagctggaggaccgtcacgccctggccggccgggttctggccgcggaccttgctgctctcgagcgcgtcgacgaactggaacaggggttgaatcttgaaaaagatcgttgcagagaggtcgcccgtcatctgcttgagcaattggccgaagccaaggtcatcgtccggatcgtccggcggcagctcgaccggtcgcagcaaaacacgctgtacggtgttgaccctggcgagcacgttggcgtgcggcgctggacgcgtgcggaagagaaggccgtcgagcgacttgtgaagggtgagggtgaggaagcgccggctgcagcgctggagggccttgagcgagaagcagtcgagccgccgggcgatctcgagccagatctccggcggcgcgaagggtaggggcgtgccgggcggattattggggagcatcttgaggtgcggcagcgagtgttccggaggagaagggctgggctggacgacggagctggaggtggtggtcaggcaagaaggtggacgaggtcgagcgaggtcgtaaaagggggctcaaacggcgtgcgcagcagcccgtcggtcagcgaggcatgagtcctccctcgctgccacacctctacctatcgaggattgcgcgagaagcaaaagactcatgcgagatgctcctcgaacttagcgagaatctccttctcccaatcaaacagctcgtccatcgtccgcagcggcggtggggcctccgccttgaccgactctgtcttgacatcggccgccgccgccggtgctttcgacggctcgggtgccggcgcgacctgcgtcgccgacgaactgccctcgacggcgttcattgcctcctcctcctcgaccccctcgcgcgcccgtcgcttggcctcgcgctcgagccgcgttttctctttctgtcgggccttgagctcttcgcgcttgcgcgtcttttcggccatctttgccggccgagcggcgaggtactgccgctccttctcgtcgacggcctcgcggacgctctcccagggaatgacgttgcctgcctcggccgaaaactcgccttgccgcgtccgggtaaggacgacgacggttgcgagcgtcgagagcgcccgcgcgacgtcgttgacgatcgaccggacgtacgtgcccgacgagacggtcatccggagcgtgaagacgggcgggatgatggccggctggccaacgggtgcgtcggtgctggtgctggcggcggcggaagtggacgctttgggcgcaggctcgaacttcggagcggtcggcgcctcgccggcctgcgcagccgctgcaatgagctgacgcgtcttttcagccttctccttctcctcgtcgccgagccgcttcgttggccattcgaacccatgcccgttaaccgggtcgatcgaccgcgacggctggaacttctcgaggacgagctcgtggaccgtcaccttgcgcgcctcgaccggccgaggaagcggcaggccgagccgggcgtactcgtacagcggcttgccgtccatcttgagcgccgagtagctgcaagtcggatcgtagtcagatggtcagcgcccgtgcgcagcttgacgtctgagcagacgaaggacgtacatcggcggcatctgcaagatctcgccccggaagcggtcgagcacgctctcaattaggtcgggcgtgatgtgctcccaggccgccgtcgcgtcgacggcgcccatcgcgtcgaacgagtcggtcgagcagccgaggattgccgtcgtccggtactcctgcgagagccgcccgcgcgcgccgcctgccagtcagcaggagctgaaggaggaacagcctcatgagcgagacggaccttggagcacaggaggaagcggctgagctgcttcgtgccgcgattgacgccgacgactagacgacgcaacaccaacgaggcagaggtcagctcgttgccaagggtgagcgcatgggaagtcgagcaggcgacgcaccgagcacgccgtcagcgagcgggtcgagcgtcccgccctggcccatcttgacgccgctcggtgcgctccctcgaccctttcccttgggcatgacgcctggctccgcaaacagcggtgagtcggcaaagagatgcttgagtgagtcgagcacgctgttggaggtcggaccggtcggcttgtggaacgccattaggcccgaaagcggaatcgtcggcggtgtgaccttgggcatggcgagagcaggctcgtagcagcgggctatctcggcggtgaggatcttgcttgggcttgctggtgctgagcgtcgaggagggatcagcgccaggcggcagcgagctctcgctctcgcctctgccatttcgacgcgacggcgggccgggggcgtaggcacgccggtgactacgacctgccctgcggacgatccgtctagtgacactcagcttgcatcgcgcctggctaagcctgcgctcggcacgatgccgccgaagccatccaagaaggtatgctggactgcctgcgctcaagcgacagcaggaggaggaggagcaggcaggctgacctcacgcgacgtgctccctcgcgctccctcggctcgacctcgtcaggacgtctacgtgagtcgaagagcagagcaaggccgccacatgggttcgctgctgacatccagaactcctcccccgatcagcacggctacgtcgacggcgatttcgtcctctgcaagctcaagggctatccaggtacgtgcggcggctggacgaccgaccccccttttgttgactccgccctcggcgtgcttcagcctgaccctgcaccgatcgcccgaccaacagcctggccaggcaaagtcttcaagcgctggcagggcaagcgggtcggcaaccctggcctgtggtggtgtgtcgtcttctttccgaagggagaccagtacgtcatgccttgtctgccggccggccgcgcgcaggcgtggtcgcgcgtgcctctcgccgaccggcacccgtcgcctacaggcagctgaccgccctcctatccgagcagctactgggcccgagccggcgagatgcagcagctcacgccgatcatgatccagaagttcctcgcaagcggcaagaagggcaaggaccgtgagatgtacgaggggtgcgtgcgccgccacgacggtcggacgtgcaacctcatttgagcagacctgaccctgctcaacccactgtgcactctttctgaaggtaccagattgctcaggactcgcgcgcatgggaggtcgagcacctctctggccctgcgcgggcgtatgacggcccagacgacccggacgacggcggcgggcacggcgccgtcaaggtcccgcccaaggccaagtctcatggcagcaagcgggcgcggtccgagtcctcgagcggcccgccgccgtcagcctccggctcgggctccggctcgggcaagcggcggtcggtctacgtcgacgacagcgagggcgcgggcgaggggcaagacagcgaggatgaggaggagcgcgaggctcgccgggcacgcaagaccaagaagaagcggctggccgggtcgacgacgaagacgaagacggtccggacggcggtacgttgcctgcgcgagctgtgacgcgcacttgtcgcctgctgtgactgacagtttccctctgcgctcaggccgaccgaccgcgccactccgacacggcttcagctcagtctgcgcaatcttcgtctgtccggcatgtcgtccagagagcgcccccgccgccgacgcagaagaaagaccggcacctggagccgcttgcgaaggcctcgcagtacgcggccggtacgtcacgccttctgagcacctgtcgacgagatgctgactctgacgtcactcgcagacggcgtcacggagccgatggacgaggaggccgcgatgcagtgggtcaggagcatgcgcgtccacctgcagcggaatctcgtcgaccccaaaccgatcgacgtacgtcctcccttgcgcacccgagatccacgacgtcactgaccgctcgtcgatctgcattgacaggtcaaggagatgttccacgcctcgcagcggctccggcagctcgaaaattgggacatcaccaaagcccagatcatacagaccaagattcacaaggtgctcttgcgcatcgccaatccggccaatgtgacgatccccgatggcgatcggcacgacattgcccgccgggccggaaaactcctggaccgctggcaatcgctccttgtcgagttgttctcgctgccggcgatgcagcccggggtggcgggctcgcaggtccaggagcagctgcaggaggggcctgagcagtttgagcagcctgtctacgacggaggaatggacgttcagcaggacgactgggaggacgccccagagaagctcgagcgtgaggagttgatcggcctcctcgatcgggagtgtgcgtgcctgtcacggccttttttcgtttgacggctcgtcactgacgtgctcttactcgatacctctcgcagtcacgccagagcgagtaatcctgcccttcacgggcgacagcaaaggcgacagtatcattgtcacgtgtgtcccgggcgacattgacggctgaggaccgagcgggatgctgacccttgtatcgcaccgtcatcaacagcctcggcgagaacggcgaggaggaggcaacacggttcaacagcgccgacctcgccggctgtcgcgtgttccgcgagcacctcgccaacccagacgtcccgcgcgagtacgaggacgaggagaacccaggccagctgctcaagacgctcgtcgtccacgaccagagtcaggccgacctgcacctctttctccacctgctcgtcggctcggacgctagcagggacatcaccgactttcgctcgctccaaacggtacgttgccagtccggtagagggtctcacgacgcccgtggctcacccttctgttgcgctcctttgtccaggccctcgccatcgagcgcgcgctcgacgcgccgtccgtccgcgagacggtcatcctccgtctgctcgaccgcgtccacgccggcgagcgcgttgcagagacgtttgcgctcggcgccgcctaccgctcaaaccggctcgtccaggcgagcctcggtcagtttgacggcaatcgccgggcagaggcaggcacgtcgaaccgccagccgcggcggatccggcttcacacgatcgacccggacctctacgccatgatcccgcatgcgctgctccaggagttttacatagtgcgctttgtcgcttgcctgctctcttcgctgtggggtctgaccgatcgctttgcgcttgccgatccaggttgaggacctcgttgtcagccagggctacacgtggtccgtgatggcatcgcagttccaggtgcggcttgttcgtcactttgtggcttgttcgtcgctttatggcttgccggtctcgccggctgacgagagctgctcttcgcgctacagtttctcgcctaagccgcgccagccctcccctcgccgctcacgactccctgccctgctcttactcccgcttccaatttctctctccactagtcgttcttcacgcctctcacgccccctttctctactcatgccgcccctgcttagcgccctgcttcccacatctcatgatcctacctcgcgatgcgcatgacgctcgccgcctgctgcaagtgcccctcgacttccgatcgctcctcgcttttccgttttccgtcggcccggccaaaattcaactatccgccgcgcgagccttttgtgtcgtcgcctcggccgcccgcgctggctcgccctgcggagagcaaagctcgacgctggcccgacgacctcccttgaccgacaccctcgctgtcgcccaccgttcccttacaccctcccggcagctcctctcagcgaagcagcttcccgctccttccctgccagcactcccctttctcgcccaggatgtcctttttcgcctctggccccgcgtccgacgactcggactcggacgcctccctctcgtccgcctcgtcgtcgacgaaggccgccaacaagaagccggcccgcacgcccggcgccgcccggggcatgtttgccacgggcgactcgtccgactcggactcggacgacgacagtgactcggactcgtcctcggaggaggaggaggagatgtcatccggcgacgaggacgggcccaagaagccggccgcgggcggaaagagcaaggcctcggcgtttcttcgcggcggcgactcggacgacagcgacgccgacagcgacgacgaggagaagggcgccgtcaagtcggccaaggacaagcgcgaggatgagattgacgcgagcctcaagaagattgataactcgagccgcaacggcaactggatcgacatctcgaccggtgcgtgtggccttgtcctcggtggtggcggttgctgctgccctgagccggacgacctttcgggagtgacgctgaccttgctggcccgttcctcgcctcgtacttcgcccacgcagagttcgacaagatgctccggctgcttcagaaggtggcgctctcgacccttcccggaacgacgatcctcctcccgccccagttcctcgcgctcctctcgacgctgcccgacgacgtcgactctgccatcaaggccgagaagtcggcgtccaagaagtcgagccaggccaacgctaaggcgctcaactcgatgaagcagaaggtcaagaaggcccagaaggagttcgaggacaatctcgccgcttacaaaaaggtgcgtcgccggcaacgagagggttgagttcgatgaagggacactttgctgacctcttgctgccgcttttcctgtgccttaggacgccgaggactacacgagcgcttacgtcgcctcgaacaaggctgctgacgagccaatcaagaaggagaagaagtccaagtcggccaagtacgacgacaatgtcgcgggcggcgatgaggccgacgagttcctcaccgtcggcaagggcggcaagtcgctcgacctgtccaaggagggcgtcttcaagacgctcaagaccatctacgacgcgcgcggaaagaaggtgcgcctccttttgtacgcgagcgctcgacccgggaagcgcgaatcgctgacgacctggccttcttctctctctgcagaacaccgaccgccgcgagcagctcacgatcctgacgacgctccaggccctccctggcctctcggtctacgcccgcctccgcatcctcctcatcctcctctcgacccgcttcgacttcaacccggcctcgcacgcctacatgccgctcgaggactggtcgaaggcccgggacgagctgaaggagctcctcgcgctcctcgtcgagcaggaaggccgctaccaggtcggcgacgtcactgtcgatgacgacgcggacgaggacgacgagtggaaggagaaggagccaaagggcgacaacggcgtcgtccgcatccgtggcagcgtcggcgcgctcgttgagcgccttgacgaggaggttcgtccgccgagctgagcctcgtttcgtaggcgtggcgctgacacgcctcctccttcgccgtcgcgtgtggcagttcaccaagagcctgcagtggatcgacgcccacggcatggagtacgttgagcggctcaaggacgagtcgtcgctctactctgtcctcctgctctcgcagcagtggttcgagctcgtctcggcaaccgagtcgacggcgcgcatcatcctccgccgggttgagcacgtctactcgaagccggacgccgtcgttctctacctcgagcagacggcccgggccgccttccccgatctcacctcgtcgatcatccccgagacgcagaacgtctcgcagctcgtccactcgctctgcatctatctctaccgctcggccgactcgctcctccggacgcgggcgatgctgtcgcacatctaccaccacgcgctcaacggccggtatcacgaggcgcgtgacatgctcctcatgtcgcacctccagggcgccatctcgcacgccgaccagggctcgcagatcctctacaaccgcgcgatcgtccagctcggtctctcggccttccgccgtggcctcgtcaccgagacacggacgattctgctcgagatcttcacctcgcagcggccgaaggagctccttgcccagggcttcccccagcagaagttttcgcagtcgacgcccgagcaggagcgggccgacaagctccggacgctgcccttccacatgcacatcaacctcgagctcgccgaggccgccttcctcgtctcgtgcatgctctacgagattccgatgctcgccaagggccacgaggacgagtcgggccggaacctgccctcgcggccgttcaagaagctgctcgaccaggccgaccggcagacgttcatgggcgcgcccgagacgacgcgcaactgcatcgagcaggcctccaaggcgctccagaacgccgattgggagggctgccgcgacctgatcctacagatcaagatctggacgctcctccctgacgctcagggcgtccaggacatgatcacgcgcaagatccaggaggaaggccttcggacgtaccttaacacgtttgcgccgttctacacgacgctctcgctcgcgctcctgtccaagacgttttcgctcccggtcaagtcggtcacgtcgatcgtctccaagatgattcacaacgcggcgctcccggcctcgctcgaccagatcgaccaggtcgttgtcttctaccgggttgagcagacgcggacgcagtcgctcgcccaaacgctcgccgagaaggtccgctcgctcaacgagtcgaaccagaaggcgctcgagatcaagctcggcacggccggcggcgagcgcggcggcgacggccgcgagcgcggtgagggaggaggcaacgccggcggccagcgtcggggtggtgccggtcggggtcgcggaggccgtggtcgcggtgccggtcggggtgccttcactggccagcttggcaaccagcgccgtgctggccagacggcgtagacgacccctcctcttctcctctcctctttcttccccctttcgcctttttctcttccccctcgcacacgcacccccgcacgccccctccacttgcctcctgtagcctcgccctacccaccctcaaaagaagcctcatgcgcgcacccttcctgcaccggctggtgctcgggctcgcctggcatcccccgcctctcgaatgacgactcagaatagatcagtggatcgaggcagcaggagcgagccgacgcgcgtacccctttgacaggcaccggcgtgctgcgcgctcgagcctccctgtcagccgtcctgtcgccgcgctgctcgacgacgctgttcgccttacctcccgaccaccatctcgagcctcgcccaccaaagcacactcgctgcctcgcctcgaaatgcaacccaccatgcccaccggccagccgctgcccttcgctccgcccgagatctggctcgagatcgcccggcgcgttgacgactactttgccctcaaggccctccagcgctgcagccggtcgtttctcgcccccacgcttcacccctcgctcgacggccttctcttccgcgagcggccaacgccgcacggcgaaatgctcgcccgggcggaggcctatcactatcggctctaccctggccgcagcgtaatcgaaagccgccttcagctttttgagctcacctcgccgctggtcctccacgatggaggatctgatgctcgagacgaaggacaatatcggtggctgggcattcccgttcacgcccacccactcttcgagtacgtcgacgcgcttgagacggccgacgacggcgagctgctcatcagcctcggcacggacgaggaggcccggcccgacggcccctttgtccgtatcagcgacctgccttgcacgcgcgaaatggcgacttcaccggccatcttcaagtacaccgtcaagaacgtcaacgagggccaggccgaggaacattcgccgcgactggtaccgcagcgacgtccggggcgagaactcagccgacaagggcgtcacggtcatccagctccttcgcccgctcaagcagatcgagctccgccccggccgcatggagctggccgaagaggagaaggaggaccactggccgcgggcgatggcctacaacgagaacggcctgaccttcagcgtcggcagtgtgtcattgtcgtcagcagccgtaacctgtctccgggctgatctagttggcctctcgttcgcagtcatctgaggcccgtcacccgcacgtcactgcatcagacgtccttggcccgctttctggtgcgtctcctgccttcttccggatgaagagtgttgcagcgctgttaacgctccgctgcgtctgcgccctcaccgcagcacttgacccttccttcgctcttgaccgctccgtttcgatacccatggcctgcttttcactcgcaactcgaacgtcccccgcaagcgtgcgcttagatgtctgcggtggcgtcagtcctgagcgtcccttctgtctgacctgggtctgataagggctgattcgctctggctcggcagtcgtcgtcactgcgtatgcatctgagccgaccatcgtcctaccatcagcacacccttgagctgcccgtcacctcgtgtccggcccagctaccgagagcgaaccgtcttgtcggacgtctggtgggggcaacaagcagagcctgtcgccggcgtgcctggctgcttcgaccaaccgaccgatgaccgagtggggcgtcgtgcgaagcgtccgacttccgttgtagggctaaacatgtcgccgataagcatcctacggtcgcgacaagtgaagtatcggccagcgagtcgcagtggtgaggggaagcggctcgtacggacgttggccttcgcgcttgcgacgtcgcgagaaggtcgccgctcgctcagacggagccagcgccggccatgccgagcttgttaaaagcgtcggccgccccattgccggtcgtctccatttttagcggccttgcgcggaacgcgtccttctcctcggtcgtcatcttggcccacttgtatgagatctgctcaggattgtatatagatccaaaaaaagcactcgtttccatcaaatcttggttggtccaatggttaagatgttcgcttgtcacgcgggagacccgggttcgattcccggatcgagagcaacccctttttgccctctgaggcaagaggcaggtcgatgaataggaaagtgatagagaaccggcggatccaccaccaggcgcgcggcccgcaagtacaccacagtcagtcaacatgtcctccgtctcggcgatgggagcgctctggcctgccctaggacccttcaaagatagtagcgcgatcaacaaggaagtcctcgagatcagacgcaaccacctacgcacgcacgcggtcggtcgtgcaggttcaaacctcccccttccacgctctctgcccgcagacgatgggaatgacgcaagccagggttgtgcgcagagtttgtgctgctccccttgagctgaggctggcgggctatggatgaggtgcttgcggcgcaagggccacatcgcagacagggctctcactcgacccattcagcagggcaggcgctcgcgcttcccttctgacctattggctgaactcacgaagcactcgaagtgttgtttgcgggtccatctattttaagttctactagagcagaccctcctgctcgagcgcccagcggacgccatcctcaacgttgtcgacgatctgcgatggctgatgcgccggcgggccctggacgtccttgtagacgccggtccggacgaggagcgatgaccacttggcagcgttggcgccagcaatgtcggacgccgggttgtcgccgaccatgaacgttttgtcgaccgaggtaaccttgccgctcgagatgtgcttcaggtgctcgacgagcatcgactgcgcaaagtcgtacgtctgcttgtgcggcttgccgagctgcgtgatctggacgtcgtggcccgtcgcctccttgtggatagccctgagggccgtcttgaaggctccagcgccgtagcgagatgtcgggtagtctgagccgaagagcaggtcggggttgcagaagatcacctcgagctcctgcttgccgacgccaaggtcgttcctgcgcgtgccgaggatgccgccctcggcctggagcagctcgctgatgatctggatctcgaggccccagtcgcgtgagtcgtggacgacgagcacggcccgaatcggcagctttgagaagtcggccgactgagcaccggcagagaatggtgaggcgtcggtcaatctcggtagcaacggctcgaggagcgagacgacaaaaacgcacgacggtgtgggtcaggtcttcggcgctgaggtcgcggaacggccagacggccgggttccagcggtgaatatcggtcccgatgaatgccttcttgaggccgtacctgtagtggcgggtcagctcagaggaagaggagcatgcgggcagaggagcaggacgtacgattctgcgactgcgcggccactctggccacggccgccgatgacgagtatcgcctcattctcgtacttttgtcgaagtgactcgcgcaggggagtgtggctctggatcatctgccggatgtccatctagaagaagggctctgtcagtcatgccttttggtagggagggtcgagcagcccgcatgcgcagggcgaccgacctcaactccgagctcgcgcgagagggctgcccgccgcgtgtcgtccggcacgccaccgccattggtgatagtgatccaggggattcgcctgtcctcgagcagctttagcgcccgcttggcctcagggaagacctcctcgcccttcttgaggacgccgtcctgaggtcgcgtcgcgggcgcgtcggagagagtgagcaaagtaccgtcagcgccgctgcatacccacaaacacctagcaggttagcgcgcacaatgtcgaatgcaaaggccaggctgggcttaaacgtcgcagctgccgaggtagacgaggcgacaaagatcagccttcgagtcagagcactggtcggcttcgggccggtacgtcgagaccgacgcgcgcttcgagcagtgaccgtggtccgactcactctggaggcagcgccggctggacgtcagaggcgagcgagtagccctcaggagctgtctagtggtcgactgcatgctggcagtagcgagaaggagtcgaagtcgggagggactatcttgtcgtcttcggctgcggcgctcttcttctcgctctgcgggcgagcttcgaactcacggccgacgcccacgcactccgccgacagcaacgccctccaagcccttcgcccaagctgctcgacatctcgcagcctcgccactacctgtcagtcccggatctctcggggagtgggaggtgctaggaggatgaggaaggagagaccatggccctgaccctcgtgctcgccgctcgttgccgctcacccgaacgcagcccggtcgccctcctcgcctccgtcgtcaccatttccttcttctcgtcgatccgtcgcgccttctcctcggagaactcggaggacgccggaggcagcagcagtcgaggcatgtcgcaggtcgtctttgtcaagtcagggaaggagaggtgcgtttccttagagctcctcgagagctggcctccgcgtcatcggcctcgacgacgaccgtcgctgtttctactgtcggtctgaccttacgcttgctctccttttgtcgactgtctggtcgatcagactcgagatcccgcttcctgcgggagtcgagggcacgacgctcggtcggctgcggtcggacctggccgccctaacgggcttctcgagctttaagatcgtctacagcggcggcgtcatgggtgcgtcgctcagggggctctcagcatgaggattgattgctgatgcggctctggcgcgcttgtagtggacgaccggctgccgctctcgtcgtacggtgtcaagccgcggtcgatcctcgccatcattggctctggcaacggcgccgacgaggtcggcaaggtcgagcgcgagctcaagagcgcaaagggccgcaagaaggcggccgaggaggcgaccgaggcccggacgatcgaggccatcaaaaccaaggtgctcgagaccaaggacagcctcggcgctcggatgggccaattcaagaactcggtgcgtggtcctgctcgcaccgcccatgatcgaccgcagctgaccttgctctgtgcgtgcttcttccgacacgtaaggccctgtacggcccgcccaagccgccatcatcgccagagtatgccggtctcgtcaagcagcacacgttcatcggcgaaaacctactccagacgctgctctggctcgacggcgtcgtctgccagccgacatgggaggaggctcgggccgagcgcaaggccgccgtcaagttcgtccagggccagctcgacgagtgcgacgccgccttcaagacgctcaaggagcggtccaagtcgctcgcttaggagccgcctcgccctgcctagatgagaatgcttggttcaaagtcgtgtcgtcaaagggggtcgttaaagagcgagcgtcttgtggcgccatagctcatcggggcggtcctatgtcgcctgccacccggtctttagccttcgagcgcaaggccggcggcggagcggccggggatgacgccgtccgagcgcgcttgtgcgggaagtagggcttgtgcgtcgacgaggtcggcgtcgcgagcagcggtgtcgtctcgctccgtgtgaggccacccgaagcgctcgggcctggtcggacgtcctccggctcgtcgttctcgtcgtcgtcgtcgtcgtcgtccaagtcgtcgttgtccgagtcgtcagagtgcggaagcatgatgacgccctagccgtcagcaaaggaacgaagatggtgtcagtccttggcaggtgaatatgatcagctgaggaaaggacgagaccgaccgtcgcagggtcgaacgagagcttcttgtggacccgctgtgcgcggtcgacgtcacctctgtcggccttgaccggcgtgccctggtaactgtcgcgccaggggttgccgcctgcctcttcgacgtcgagtcgcatgccgtcgagcagcgtcccttcgcgccggccgttctgcgagacgggcgccgactcgctatcctcggcgccctcgtcaggcggcgtccgcttgcctttgtccttgaggtccatcgacagcttcttgaccttgcggccgaggctgagcacgacgctgaactgccgcggccgcgtcttggtgccaccggtgctcgactcgccggggctaccggcagcttgagcgaggagcgactcgcccttcttgagcgggagcctgcaggcgagccaacagtgagcagagaacagcgtgagatgcgaccgcaaagggacgagattcgactgaccaaggcgtcggaagcgagccagcgagagccggatgagcatagcgccgcttgcccgtgttcagaacacctgcgtaatagccgcccatcggtggttgcgagctgaaggggagcccgagcggaggtcagcgcccgtctttgcagttcggtcataactgcaagctcgaggctcactagtcggtacggtcgtccgccggcgcaagatacaggtcgtcctggttgttggcgtaccggcggcggttgagattgctacgcgcgcaggagaaggagaagagtcagcgcttcacacagggcgatcgttctccacagggcctcacgcttggcttcgtgtcacctcgccgtcgacgccgtcgtagccgaccctgaggacctgctcggctggctcacccttttggacgtcggcgatcaggctgaggctgacaaaggtcgatagcggctcgaagcggtgatacatgcgccagctccagtagagcgtgaagacgacgagcggcgccatgcaggtcgagatgatgtaggccgtcttgagaaggaagaggccggtcatgaagacctcgaagaggagaatgccgagcaccatgcgcgagaaggccgtcgaccaggcctggccacgcgactcatacggcttgtagaatactgcgatcgggctgtcagcggtcggcgcaaatcctcagcagaccgaagagggagacgcaccgaaaagcagcttgtacttatagacaagatagcccatcccaaagtagattgcgccaaacggcaggatcaggggtgagacgaccgagtacatcagcgtgatgacgaagacgaggagcgcctgggggtagacggtcccatagttgagcatcggcggggcgttgagctcggcaaagtctgcgcgagagacgccagaagctgtcagctggcgcctgtttaagggagcaggcggaggccctggctcacctcgcggcgtggtcgtccagacgagccggtagaagccgagactgagaacggtgccaatgttgagcagctggaacggcatgatgccgcagcctaagaaagcgtatcggtcagccttcactcatgcacgaaggcaacttacgccggcacgcaccctgcagaatgacgtaggacaggaagaagtgcttcgccggaccagccgagagcgagtcggccagcttctccgggatcttcattggagtgccggcgagatcccagatctgcggtcgcgaagaggagatcaacagtcaggcgcgggcaatgagatgaccctaacccgaggagactgaccaaggcccagtacgttgtggtgatattccagacgaaaatgatcgaaatcaggaggaagatgaagtacctggcccgagcaagatcgcgtcagcggtcgatcaaacgacaggcccggctcggacactcacttcttcaggaggctgtgctcgacccagctgcgcgcttggaatccctgagcgtagcagaggtattcgagcgcgtacggcaggagcgcgttgaacgcgatcagcgctatcgacggcagcgagttctgaacgaaggcccggagcggcggcgactttttgagagcccgcgtcaggcccgggaagaggcgcttgagctcccggtaggagagcagcgtcgagagggccgcgaccggcactgcatagagggcgggcaagtcagcgaggtgtcgtgcatcgcgcttcgaggcaaggagctacgcacccaaccaggtaagcaggagcacagccatgatgcccataatgatccagtcgcggacccagcggttcgactcgctcttgccgacgttcgaccagacgacgtcgcggggctcgggtgcctggctcgtcaggcactcctcgggcctcgatgagtgaatgacctgggcagcaatttgctgtaggatggcagggccggaggtcagctgggtaggccgtcctaaggagacacatgctgacactcgacgcaccgcatccgccatactctccatcgtcacgaacgcggcaccgctcgcctcgaagcgaccggccttgcggatctccttgacgcgctcgtcccacctggcaaactcgccctcccagtagccaatcttatcgacgaagggccgccagggggcccagcggttgccgccgatgcggatctgcggccgccgacggccaggaatctcgagcgtagcgaggagcggggccaggtcggtcggcgtagcgtcctgaccgggcgagccagatggcgagggcgcagacgacttgtggaagaggccagagtcgatcgtcgctgggttgccgacaaactcgacccaggcccgctcaagctcgagcagggctgccgttcgcttgttgagcaggtctgagaggccgccgatctggcgcacgcagctgacgctctcgacgccccagccgagtcgctcaaagtaatcggccagcgcgcgctcgccgcggaggtgcctggggatggcctggacgaggaccgtccgtgacgagactgagtggacgagctcgagcgagaagagctgacgggtgaggagaaagtggttgaaggcgcgccagagggtgtagagcgcgaggagcgagaagaggtaggtgaagaggaggtggagcgacaagctcgtcgtcgggtccgtcagcagctcgatgagggtcggcgggaccgtcccgttggtaggctggcctggagcagccaggatcggcgagctgttgacgagcgagcgcagaccgccgtggaaaagagccgaggcggtcgagttgtccgggtcgtccggctccgagtcgaccgagccgtggaccttgatgttgaacggcatcaggacggcagcggcagctaccgagcagatcgtaaagaaccagaagcacatcttgaagaagcttagcaggacctgaggatcaagcaggtgggatcagcgtcgtcccttcccggttggctgcgagcgagggtcgaccacgcacggcagcgtcgagcccgacgatctggaggacgactcgctcgctcgtccgcagcgtcggcaagatccagctccatgccgagcggctctcgtgatgggcgtccgagggcgagaagcccttgagcttggtcctcggcgcgtaaagcagcgtgtagcgcggccggaggtaggcgaagaggaggaacgacgagatgccgagcgagagcgagagcacgagctgagtctgcagccaaggaccctggaaccgggctacagcagcggatggagcataatcagccgccggatcgcagtgtctgctggcttgcctgggcagggagaggaggacgaaccagcctggctcggaccggctggcgcaggcagggtcaagggcaggtcagtcgacggcctgatctagtttttgaccaacacctgtcagagatgcaactgactgcctggaactggcttgaagctgtccccgagcccgaggtccatcctagttgcttgagaggtcgtgaagggaggagagtcaaggtggcgggtcgaggacacctgctgggctctcctctcgctcggctcccctttcttgcaggcgacggcgagagccgcgcgcggtgacgcagtcggacctcccttcgctgaccccggtcaaagcagcaagcctccaggacaaggcaggcgaacgagctgagacgtcggccagctgctgccgacctgacgcttctatcgatagcgagaaagcaggccgtcaatcccacgatctatcgcaagacaacgcgcagcgtctcgcccggctcgaccccgaggtccttcagcgtgcgcttcgcgccctcgagttgctcctccgccccatcgtcgacgcccgtcgacctgcagagccggatcccgtcagacttgaggagcgaggcgggtgacagggatgaatcgagatgcttcgacaccttgagcaagacggtgcggagcggtgtcgagggaaggaggcgcagggtgaccgccggtggtgtcgaagacgcaggcaactcgaaagtgacgtctgtcggcagacaattgatcagcagagaggcctttgatgggcactctggtcaccgggtttaccgagcagcttgtccttgaggacgatggccgacggcttgcgcacctctcgggcaacgccttcctggtccgactcttgagccgagccgtgacctgcaggaacgcgatcgtcagcgatgatgtcccctcaagtgtgtcgctgcggatgactcacgttccgcgagctcgtcccatctcgctctgccaggggctggtttgctcgaggagacctcggctgcgttgccgcagaaggctgccggctgcgagaggacgtattcgagttctgctgccttccgctcgcccgcagaaatctaggacgaaaggaacggctaatcagtcctagaacccaccgctgactcggagagacgactcgactgacctctgagccgtcgaggaccaccagcccccggacgcgggcgatgactcccgcccggatgtctctcgtcttcctcctctccctgcgctccacctccttctcctcgacctccgtcagcctcttaccgtctccagagggcagtttgatggcggtgagcgggttatcgccgagccagagcacgcgaagagttccgagccgctcgttgagcaagtcgaccgtcgaccagtcgtcgatcgcgttgcgcgcgagcctcagcgtctcgagctttggcggtaagaagctgatgggatccacgtcgccacgtgcagttgacaaaggaaggctcggaagtcggttgttcgagagcgaaagcgttcgcagcctgagtgggagcgagcaagtcagtacagcctcgagaccatctcccgaatgaagttacaaggcgacgcacccggcaagttcgccgagaaagccgagatgcgaccagtcgtcgagctcgttccagtcgaggttgagctcttgcaaactcgggaaccagcgctcgcgccgctccgcgtggggcatggcgaccgcagatggtcgatcaacgtctggccccgatagagtcgcggaggagatctcgaacgatcggaggtgatttgacgaataggtgagggacttaaggttcggtagcgatggctccaggtcgaggatctgtgcaaacaggggctttgcgttaagaccaagctcggagagaacgctgctcagaacgcacggaagtcagaggcagcattgtcgctgtcagattgagctccctaagcctgctgaacgcagttagttgttctggaggcggtggcgccaagcgtatgcggttagacctggaggcgaagaggcggtcgaggggtcagcaggttaaggcaagtaaggccgttgcggggagacgatgccactcacgtcaagtcgagctcctcaagctcctcgagaggtcgtatgatccgatcaacgtcggtccaggaggccagcaaactctttgacaggttcagccgtctcgtgcctacttgacgagcgcagcaggatcggtgcggtcagcgtgtcagatctccaagcgtcatgcggcaccgacgaattagaccgcgacaagtacagaagaagggagccagccacttacaccaagggcccatcgactgcatcgtctcctcttcgtctgagccgaggaatccgaccagagcgtcgtctgccccgacctcgcgcagtgccgtcaccttgccgagccgccgccgcaccttggccaggttgggcgcaatgacctggatcgaggtcgatccgagcgagacatgctcctcgctcggcaaagtggacgacgacgccttcaactgggcggaagaggttgacgcgttggtcccaggcagcggcggcgacgggagaagggccgaccccgagctcgaagaaggcggcggagcatagcggtcgagcaggacctcgaggaacggccgcggccgctggatcttgttcgaggtcggccgcaggaagctgcctgctgttggaccgctacgagcagtcaggcaagccgcagtcggcagatagagatcagctcacgttggccgggccctggccaagctgctgttgcgtgcctggcatgggaggcccaaggtcggccttcctggcgaggaatggacgcacaagcagctgaagtagtgcacgccggcatgcgagccatcatgcttgccacgggtcgggtcgtcccactcgacgccgagccatggtgcgtctttcggcgtcgtgcccgggagcaggccggcaaagaggatggtgcagcgcaggccgccgaccgagagccgcgagccgaccggaaaggtcgccaaggcggccgaggacccagtagcgctggccatgagcagggtctcgctgcgacgagatgagacggtgagagatgctggctgaagggagtcgtttaagctggcgggcagtgagggagaatggagcaacggcagccggtcgagcacgtcgttcgcggaccggagccgacgaggggccgcaggacaatctcccgagacgagaagagcatgattgtcttccgcgcaatctaagatctcaggcatacaggggcgcacaaaagcagtcgagaggtagaggcgctggcccgcagcgccagaacgaaagggcaaggggtatgggccggaagggtgcatcccctcgaacggacggaggccagagatcgacaggacgcgaagatcctcagcagagctggcggatgagtgaacggaggcgatcactcaggccgcttctttggcggcgggccgtagccggacgacttgacgccggcgtactgtgaggacgattcagctacgtcagtactgctgtgcgacgcgcgcgacgacgacatggaaggtcgcacggagggtgtcttgccgcgagcggtcgttgttgccggcgtcggtatcgagctgccaaggcctggagaatcagagcgggtcagctcagtccgagatcaaaaggcagaatccctggttggacgtacctgcgcctccccgccctcgactgcccctcaagctacctcgtgcaatgcccctcccgcgctcactgcctccccacccgccagcgccacccgcttccctccgccggagagcctcctccgccgctgccctctcgcgctcggccgcttcgcgtgctcgagctgcctcctcctccatccggagcgtctgttgtcggagctcctcgcgctcgcgctcgagcgttgccatcagagtctgcatgtggatggcgtcctgaagcggacgacgacggatggcagaggcaggttattggaaggatcgactcagcaacacggggggcgacgccacatgaggaacgcacgtctttggcgccggtccagcctggattccgcatcagcgcaatcgtccgattctcatctcgaagcgtagcaatgtagttgtcgaggagcgcgttcgtcgtctgcgtctgcgctagtgccctctgcggagacagttcgaaagagtctcaggttcggcgttcatccgccatcgcgttcgctcgagggcaacgagtctcacctcgtggacggcattgacgcccttccgagcgccgagcagcttgtcaaacagcttgttgagaccctgcagctcgtataatgtcctgcggagcgtcgcgtcgaccgactcgtcctcccgtgcggccgcctcgacgccatccgcctcgtcatccatgccgctgcccgagcggcctccgagctgcgagaccgtcagaggctcgtcgctgcctcgtgaggattgctgcggcgtgcttgtcgccgacccggcgaaggaggaggcggccgaggctgacgccggcggggcacgcgacgacgagctgctcgcgccggtcgaggtcgcgagagacgcatccgcccggccggccgagcggctcgcgagcggtgtcggtggcgggcttagctcgcgcggtgcgatggtcgccccgggcgcaaagaggctgaagcggggcttgctggccgctgccctcggcggcgggaggaaggaggatcgtgcgggcggagggccggtcgacgacgacgcgccggcaagcgacgagtcgtcgaatgtcaggtcggcaaagttggactcgacggactcgtcaaacaggttgccgccggcggccgacgacggctgcaatgtccgagggagcaatggtgaatccatcaagagacggtgtggatggatgcggaaagtcgtcgacgtcggaggcgaggcaaccggacgcgtttcggctgagcggccttggtgcgggccgggaggaggaggaggtgcaggccagtcagcgccagcagactcttgaccacatcattctcttctcgacgataaaaacagttctcaaggatggccccatcgtgcgtctctcgtgctgctctctggtcgcccgagacgacgctgattcatcttggatgcggtatgctccagatcacgaacggctgtagccctcgacggctcgacctcgaccactgtcacgaccgcctcatcaccgcctgacaatctcccggcggcagggacgctccgtcttcgaggccggcatgaggtcgtcgacggtactgtcaaatcgtcggagaagggcaaaggcaaggccaaggagggcgaggatgaggcggagggcgaggccaagtcggaccgcgtgacctgggttgaggggacggttgacaacgagtttctcggccgcaagtcgagcaagagtgcgttggcctgcttgcctgtctgctttgacttggaatcgcagcgttgacgagcccgactgctcttcaagtctgctgcatctaccacaagcctcggccctttgacgagtcgtcctcggacgagtcctcgacggacgatgatgagcaggcggccgagctgcagcgccggagtcggcacggtacccgccgcaagaagcaccatgcgcacgagcacaaggatggcgaggagtgtggaggcggtggcagcagtagcaagggccagcctaacaagcttgacggaggcagccggagggcctgagcgtggccgcaagcaggaggccgagcgtgagcgaaacctcagtacggcttccctccattctggtccagctctcttgtgcctagtgatgcgacccctcttcagcaggagagtccttgtagaccggccgatacgctgtctcgccgcactcggctgccgggctgcgacctctgcggcgtgacggaggggcctggctcgccagggcgtagtcgccttcgtcaggtagccacggctcaaccctcatactcgagccgacctgctcgtcgcagggaagcgtctcactacccccgggcaaccttggactagcccagagccagccccccttgagttcgaacctccaagactacgggccagagggtggcctgcaatcgccggtccaacccgactaggctttactcgactcgagcctgggctggcgcagggacgaatggagaagtctttcatgcctagagaccgccggacacgtcaaaagaagaatgggctgccaagcgaagcctgtgggtcatggcgcaggttggacgagctctggcgggctaagaaagattgcgactcacagatgagaaggcggaccgaggggtcttcgtctgggcgacaaaacccgagctggaagccatcccttggccgtgccttggccgtgccggggttggtggacacggccgtgaacgttgcgggcctgaggggccgcgttgtcagtcaccctgagcgggaggggcggcgtgtcaaaggcagagcacaagggacagacgtcgaggaaggtcgaaaaatcaatggcgagcatcacacgtctgccttcgtcctcggaaatctggaagtgatagacgaggttctcaatgtcgatccggctgccggccgccatagggccgaggaacttctcggtcagggccttccaaaaggtctgaaggacgttggcgacggtgatgcctgccggtctcctgagtcgccggcgaggcggagtgttgaacgtgacgaccaggtcagggcccgacggcgaggttgcattctcgtgggccgctccgcaggccgacagacggcactggcgtcggtcggctcctccaaagccgagcaggagctcgggctcctcacctgcagccatgtccgcgctcgggtcgacgccgatccacttgacccacgtcagcagtgggtgcgtcgcaacggtcgagatgtcgatctcggtccacttgtgcgagctcgtcgttcttgccgtgaaggagtgaggcgaggcgcaggcggcgagctctcggaacgagtgcgaggccgtccgcaggcggagcaggtcgaagtagctcaggctgggatccgaaaagatcctgagcagcagctcgggggatagctgttcggccatggcgaactgtcctggctacaaattgctggctacgaattgcggttgggtgcatagaggcaagcgacgagaacaaaaggcgacgaggagctgggcatcgcaggagggtccgcgcagcagctctccgacggaccgtcggctgccagcccgctgcgtctttgagccttccgtacatcgctcgaaagcaaagcaagaatgcggagctgcttccgatacctgccagtcaggccaatgatcccagaaggagaggatccgaggatcaccggcagcgaatgccggccggcaataagccgcgcgtctagcagaggcctcgcgtggtggagcttcagcccaccgcgcactcatgccggccgcccctccgacggagcctccggccactccctttgctacaaagcgggtttgcttcaaaggagactcgagcttgctgctctcgagccgactgctgtccccttgcccttgccggcatgactctcctcgatgtaggcattcaagtgttccaggccacagccgtgcagattgccttcctgcctgtcacgaacgcctttgacctcgcttccatctcctcccggccggttcaacgccatcaaggcggcacctccctcctcggcctaagccctggaccgtgggcggtagcgaaggatgtctggcagaggtctggcgtgagaggcctcttccgaggtgcgtctggccttgcatagggcaagcacgagctggcgcacctgtcgcggccgtcaccctgaccaccctcttgccaccctcgcaggcctgttggtaaacgtcaacactgctgtggtgtggaatatctgcgatcaagtcgtcgagcggtatctcccgccccatctcccgcactacctgccgctcaacgtcgtcctcctctacgttgtgctcctgccgctggccgtgctgccgatcaacgtgctcgcttcggacgccttttcatccgccggcgtctggtcgagccttcgccggcttatcgaccagagcggcggtctatggtcgatgtacacctcgagcaacattctccccgctctgctcggtatcgccgttcgcggtctcgaccaggtctgcctgcaatggctctccctccggatcaatctcgcccggacggcccatcccaacgctctgagtggtgtcattgcctgggccaccagcgtccttatcaacgccgtcagtcaccccctctgggtcatgcagaatcgtctgtggctcagtccggcggccctcggacccggcatcggctccgttgtcgccctccggaagcagccctacattggtgtactcgattgcgcaagatcgatcatccgcgaggagggctgggctgcgctctaccggggcttcctcgagaccctgatcctgtccgttccgggtgctcttttcggcgcctggcagggccgaggaatcgtcgcgaggctcgaggccgaatctgaatgacttgattgactcttcatcgcatcagggcgcacttgattccttgcggccaaagtttttgaagaacgagaagcggccgcctgtctggccgtcgccgctagcactggcgccgccgagacccattgagctgaggccgatgccgctgcctgttggcgagagcagcgcccggtcggccgcactcgcattggcaagcacagtcgcgccgccggcgtccatgtcgagcgacgacaggaaagacgcctcggtcaggtcgtcgaggaccgaggtgacgctgacaaagatgtccaggaggcttgtctgctgctttttcggcgtccccttgaggtcgagaatctgcaaggtaacgccgtcagggataattcgcaaaggttgaagagcggatcgagtcgacacaccttctggaagttgctgaaagagcggtcgccaacgagcattgtgtagttctgcacaaaagcctcgggaggctcctcagggacgaggacgaccttaaggattgtctcgaatggcgaggtcgcgccctggacgtgtcgctggtatgacctgcgagtcggagaggagagggtcaggaaaggttcctatcgaggtctctggaagaggcgacgtactgaatgcttcgcgtgtcatccttcgggaagagcggaagttccaccaggcagcgcttgatgatcgagaagtcgagcaggagctgagcagcagaggaggagacgaagtcgtgtcagccagagggaaggcagacgtggcaggggcgctcggctgacctgctcggcgccaactttcttgagcggccggcttcggacgagagcttggttcatcttgaccatgacaacgctgcaaaggggaggaaagactgagcggtcagcggtgaaggaagagggacgctgtcggttcgtgagagagagcactcacccaacggccttgtcgcaccagctccggagccaccgcttgccctcgacaccgtcccggacgaggtcgcccatggcatcgaccgcgtcgacgagcgcgggcacataggctgacgggcccgagacgttctcgatcgtgtcccacgaggagcgggagatggccgtcgtatggggctcgatcgagagctcgagctctttgaggagcgagagcaacgaggacgagatgacgctgcgagcaaggcggagtcgtcagcagaggtccgacgcagcgccactctaaggtggacgatcgactgacgcaatgaactggtcgcgctcctcctggaagctgatctcgtcctgcaggctgtctgcgatgcgctccttgcacatgtcctcgagctggccagccgtcgtcaggcaatactcggccgtgttgaggacgaggcacgcattcttgacctcgccgacgttggcccggccctcaacactccgccggtcggtcgatcggcggccggcgaccgagacggcctcgcgcttgagcgaggcgagcaggatctcgtcggcgtagattttgagccactttttgaagacaccgatcaggtctttgagcatgccctcgcggctgcagaggtgagcagtcgaaagagtgagcctccgacgacgcagtcaagactgagcagttcggcgtcgcacctcaaccgcgcgccagcctcgagggcttggccgtaaaagtaaaagagctcggtgctgctcgcgagcacgcggaccttttcgccctcatccgtctcttgctcgccagacatccgcgtcacctcgagtgaagggcgggtccggccgcgcgaaggcgccaaaatgtccgagatggccctgagaaaggtggcgggagttagttccttagacttagccgggagggtcaggcaggaggaatccacttgtcctgcgcgtcgacgtaaacgccgaggtagccctcgaacacctttgagatgcgctccgacgtccgctggaaggacgtgcttggcggcgcaacccggacgacgtcctcgaacgttgcctggtagcgggcgctgatggtcgcctcaaactcgagcgtcgtctggagcgcctcgagcagggtcgagacgggcacgttgtccttccgcgcgaggaccgtgccgaggtccatgctgagggcggacgagacagagttaatttctcacctcgaggtgcgtgatgcgcaaagcggaaaactcacacagtcatctcggcaaagcgggcggtgacccactcgccgaccttccaagcctcgggccaaataccctcgtcgccctgctgcgccttgagcacgcgcatgaagaacgcatagcgccggccgacattgtcgagcccgccggcctcgtccgacgagcggaagatgcgccggtactcgcgcaggaggagggtcgagtgccggtcgagtagcatgttgctgtggcaaggctcgtcgcgtcagcggggggacagcctcgccctgccagacacaagggacgaaccggacatcaggcccaaggacgtcgacgagcaggcaagcatctcggatgacagccttatcggtcagctctttgccctgttctggcaagaagctgaagtacattgcccgccagtcagtgtctaggctgcgcgccgctgcaagtcgcgacagaagtcgacgcactagccctcgaactcttccatgacggccccgcggacctcggcctggacgcggccgaccttctgaagcgcctcgcggacgcgttcgagcgtcttgtagccctcgagctcgagagcaatccgtttcgtctcggcgagcgaggctgcgagcgagcggtagtcgcgacgggggaggaggagctcgagccgggagatcgaatcgtctgcgcgaggttgccggcaaagcccatcagcgcgttgctcggacgtataaagcaagcttgggggggacgcactgaggccctcgagcccccggaggagcgccactgaggcggtcaggttgcgcttaccgaggtcgagcacctggatgtcgcgcgtgatcgagcggacgaccgcctcgctctcgagcgacttctccttgatgcgcgtcgtctgctcgagcagctcctggattacggcacgtcaagcagtcaggatcctcctccatcctcggctggaagcgacgtcacgcacagagatgagcgagtggatcgcctgaacgcgggcctcgccgccgccggacgcggacgacagcgacgcctggagctcgagtatccgccgacgcgtctgggcgagctggagccgcagctgggcctggacaaagggcgccttctgcgtgaggtcgtgctctgcacatcaggcgagccgagcgaaagcgaggtcagtctggttgcgagagctctcgcctgctcaactggagctgagtgggctgcgtaccggtcggcagcaggtcgtcaaccgtcgccaggacgtcccgcgccgggtcgatttcggccagctcgacggctcgtggtggcggcgcgggcgacattccggtcggtcctgacaagggtacggctcgtgaagcaggatggccgtatgcaggacagtcgtctcgaccatctcgttggctgacgcgcggccgctgcggcggatcgtctcgaaaagccagagagagagagactcaacctcttacccgaccaacgtcgaccttcttctcgcaagcaaaacgctcgtcctcgccctcgtcgagaccagccgctcttgccactgctggccgttgctagctaagggaccggccggcgcacgcccagcccgcgacgacgatggcctccgcctcggacgaccacgcgctctcgaccctcctgtcgtcgtcgcctcttgcgctcgagcgggcaaaggacctcctgagccagctcaggctctcgaccgggccgggctcggccaacgagctcgactcgttctgtacgctcgccctgccggccgtcgcggccctgctcgcttgcaaggcgttcgtccccttgctctcctcgtggtccgcgacgcgtccggagttgctgacgctcgggcccccctgacttctcgcaggctcggactcaaggacttgctcgaccagaagacggcgcagacgcggtcgagcacaaacccgcgctcgttcctcaaggccctccagatcggcgagctcgtctcgagcatctcgatgtcgtcgacggcctcgggcccggccgcgtcggcgtcgtccctggccgcgctcagcaacggcagcgccggcggcggcaacagcagctactcgcgagccggtacgtcaaagacgatcacgtttcagtcgctccggcgtgagattcccggcgacgtgcccgacaaggtactcgagtgggcgcggaccgtccagcagcgctttggcgaggagctcgtcgacaagggctacaacgtcgctggctttccgacgccggctgacgctgggcctgagacgagcggcaggggccgcaagatcgacattggcacgaacgtcaccgtcaaggacatctttggctgggtgctgatggcgtggggggtgcgtgccctctgtgtttgtcttccgcctgagcgcttgtgctgacgtcccccctccgcgtacgagcagagcaaaagcatgcggcctgtaacgcagggcaacgccaagtcgctcgacaagctcctgcccgacctcaagaagctcattgcgtccgacgcggccaagcaccgcgcctcggcgccggcctccgagacgcagcccggcgcgccgacgacgaagcgcgccctgctcgctgctgctgaggcgaacaagcagcaacggcgggctgcgatccctgtccgggcgccggttggcaagaagcccagcatcgccgttggcgactcggcccccggctcgatcggcaagacggcttccgcgtcgccctcgacgccgagcgcgacgccgtcgaagcagtcgtctcgcatcgccgccctcgccgcgagcaagcacacaccctccccctcgtcgccgctcaagcccatcgtcgcgtcagcctcaaagcccgccgcctccgcgaccaagcggcgtgtcgagcgcgccgccagcgacgactcagacattcaaatcatcgagccgctgacgccgaaagccttagtttcgacggcgacgatcgtgctcgacgacgccgacgaccacgctgacttcaagacggacgccgtcgtcgacggcgatttcggcctcgtcgcgccgccgcgaaagaagcagcggcgggcgttcatcgacgacgccgacgacggcggcatggtcgaggagcgctttgtcaagtacatcaaggtgcgcacacttgagctccgatccttgtcacgagcacggcactgatcaagatacgttgtggcatccgcccgcagtggcgcaagcgcgagctcgcgatcctcgccaagatgcgggagcccccgcccccgcccgtcgcggtggaggagaaggccgaggagaaggacgacgctggcctgtcgggctggagcgacgacgagggagattctgtaagtcgctgtttcctctgccggacggccctgaggcctctcaaactcccggactcgttttctcatcctgtcttgccgcgggcctcgtctctgaaccgcgcagcttcccgttggtctggccgcagcaacagggccttcgacacccgtccgcgttacagtcacagccgccgtcggcgacgggctggccgatgccccaccggccagcagtccagctctggggtcagacgcggccgacctcttcgatggcgacaacgacgaccccctcaacctatttgccgagctcgtgggcgtcgagagcgagccagccgtaccccggtcgccctccccaacacccagctcccggctatagtgacgggccatcctcccaaccttaccctccagggccaggcgcctttggccgaccccctgctgcttccgacggcagctggggccagccgaatcggccgcccttcattaacgcttcctcttaccctcctcccgcgccacctcacgacagcggctggggcactcgacctcgcgcggccgaccctgtcgaaccgtctcacacgtcgggcggcggcaagttctggtcagacgcctcctcgcggtcgactgccgagattccgtttgcgtccggcttcgtgccgccaccatctgccgccgccgtaggttcaacacgctttaagacgggctggagcacgagcccctcgccgccgccgccgcccaatcgagctgcgctcccaggcgctgcgcccctgtcgaggtcgagtagcatcatcgggcaggctgcacggccgcctcctgccgccgcgcaggcacgtaccggctggacgtcgacggcctctctgccgcgcgttgcgagcctggctgcacgccccgtggtgccggcgccagcccggccagtagcagctgcgccgtcgcatctcccctcaacggctgcaacgccggttacgagggagggcacaggctggacgcctacgccttcgccagaacaaacgacggcgaccctgccgcggctcttcccaccacagcccgcatcgtcgcagccaggctacgttcagcagcaccaacggccttcatgtcctcctccgggcgggtccaactcgactcagcccccacggccggccgttcctccggcacgagagcacactggatggactccgaccccttcgccagaacgcctgaccgcccagctgccgcggctcgaatctgtatctcctggcccggcccgcgctcggccttcggcgtctttcgaccctcgccctcgtccgctcggcccgtcatcctacagcggctcctcggctggtcgggaatgggcccgttcgcctacggcacctgcgccactccaacagacgacgtcgcgaaccggctggagcccgatacccgagccagagcaggcgcgtcggtctctcaacacgcaattgcccgcaccagctccgtcctcacggccgccaccgccggcagcagcccctccgccagcgtcgcacgtcgccactggttggacgccaacgccttcgcctcctcctcagcccaactctgctcgtccgcctacgcaatcctcgtcgtctgcccagccggccgcgcggggttacacgggctggagcccggacctgccgcgtgcgccgccacatcagccggcggcgacgcaggcgccgcccgcacctgcccgcttgcctcctcggtcgcctccccgtgcgccggggctcggtcgcgagcggccggcccctgcggtctcatcggctccgaggaccggttggacgccgtcgctctcacccgacaagccgacagtcccgctcccgccgcagctgccgcacgtccgaccctcggcgttcaacccccagtcagctcgcccgtccggctcctgggacggccctcccgcctccaacaggcgagaggacgactacgctcctgcccgccgggcgccatctggcgaaggaccgcaggtcatcgatcaagcccaggcggttggccagacggtcgtcgggtggggccggcgagccggcgctgccccgccccctcgtgcgtccagagctgacgagtcacgcacaacagcgccgagccggacgagctcgagcggccgcacgagcgcggcttcgcatcgctcaaggccgcctgtcgccaatccgccgtcgagccattgtccgccgtctcggccgccatcggcccaggcagcgccacaggagcgcaccggctggacgccgacgccctcgccgccgccgaccggtgcagccagccggtcgcaggcacggcgcgagtctcctcccccggctcgaccggcgccgcggtcgacaatcgtcgcacgcagcggtagcgacaatgggcgtagtatcagtcgcgcaaattttggctcctcgcagcggcggccgttgccctcgccaccctcgcggccgtcgacggctagtggaccaccgccacggacgccgtcgaccgggccggcgagggtgccgaccggctggacaccgacaccgtcgcccgagcggcagctggctccagctgccccgagctcggaatggtctgccgtcaacccacgccgcgccaggccgcctcctgctgcagtccacgatgcctgccgccgcgtcttcggctgtcgttccggttgtctccaccggctggacaccctctcccaagcagacgactgcgccagtcctgccggccgcacggtcgcacctggcgctgggcttcgctcgggcgccttcgccgccggcactttggattcagccgcaagaggaggagcgtctggtccggatcaaggcggtcgatcagaaggagatcgacaagtacctcggcaatagcggcggcattcgcggctagaatgacgactagcagcaggcggccccgcccaaatcacatgcactctgtttcgccctcgcatgtgttgtactgccccgacgcaagcaaaagagagacaggacatcgaatcgacagcgtacaacaaggcgtacaagctccccgccggcgctaccagccgaagcgaagctgatcgcgagagaagatcggcggcttccaattgatctttgacggctcgatccgccgacgcgtcttcttctgtgcgcgctcgtactgctcgagcacgccgtccgtcaggcagatgacgtgttggcctttgtagaagcggagcatcgacatggcctgacatctgtttgaagaaacggcgcatgccaggtcagcgggggcgaagggggaaaaaatcaagaagggctcgggacggacgtgtgcatgacgtcggcgtgagtcagggccgtcttctgggcaatctcgtcgatgctgatctcgatgtcggccgggagcgagagcaggcagccgacgatcgtttcggcccagtaggcccggtacgagaggaggccaaggtccgacagcggcttctcgggcgagccgagcttctgctcgatctttgagagctcgtacgaaaactcgatgaggagcttgccgtagccgtgccgctggtgttgcggcagcgtcaggatgcaggcgacgttgtagttttcggccgactccttctccttcgaaaagtagccgatgagatggcagccggtgtcgtcccgcttggccatgcagtagtagaggaaggggtcctgctcgcgggagggggtatcagccgtctggcagaggatcatcccaggaggtcgctcgaaggggacgcacgacgtcgtagtagagcgtcttgtgatcgaggaacatcttggacaggaggcagaggttgcggcaccacgtcttctggcgccggccgtcaatctcgtaaaacgaaatgtcctcgtgccggtagatttcgttgccgggagggtggtggagcgtgcacttcacgcgatgccggccaagcatcatcggcgaggggaagaacgagaggcacatctcgcagatgtagaggaccgggatgtgggcgtactctttcgggtaggccgaaaagtaccaggcctcgacctcgtggccgccgatctggattcggttgaggtttttgacgcgcgagatttcgccgtgcgactgcgtcatggacccgccagttcggagcttctcaatctcgtcggcctttgagaagacggccggcgccgctcgcgggttcgatggcgcagcgagcgagcccgacgcgacggcctgctcggcgactgacgatgcatcggccgcgagcaggtcgtcgtcgtcctcgccctcggcgtcatccatgccagcgtcgaggtcgcccgtcttcttcttggacgactttgacttggacttgctcgccggctggttcgagaagctcccggccttggtcgccttcttgagcaggctctgtggccgggcgggactgcctgccggcgttgcagtcccagagtcgagcccgctgccgggcgcgcccttcttcggcttggccggtacgggccactcgagctcgcggccgagcagcaggcgggtcgacgggatccactcgtcgagccgcttgttgaattcgacgtagtggacgtagtactcctttgtcggcgccgtcgcgccctcagcggcagcgacgggtgcaggtcggccgtactgcatcttgctcacatcccggaccgagagaacctcggccttgcgctcctccatctggccctgcgacgtcggcttctggacaaagatcttgcagccgacaatgatgctctgcaaagggaggcaaggtgttcgtcaaccaagtgcacctcgagccggatgagacgtgcgggcgggctcgctgcagtggacgcgcccacgacctctccgccggcgagacaaacaacgcacctcgagcgagtaactgccccctgccgccgtcgtcggcggggccgagcctgcccggctatctgaagccgacgagcctgccatgtcggttcacgacctggtgaggctaagaaggaggtccgagagcggcgggagggccagacgcgagaaagccggccgggttacggcgcacgggttgaggttggcgactaacgctgaggcgactgaagatagaagcagtacgcggaggcctggcggtcgctgacacagcgcaggtacccaaacggggtcccatgtcagcttcagagaacaggaatgtccttcgaggtcggaacgaacgaagtggttggaagggctggcagctgcttgtttcgagggtccgacactaaagacgggctggctcaacgaaggcaggtccgttcgcgctcctttgacctggagaagagagctgaaggctagccggtactatttcgcgcggtggtggtcgtctgaagggtgtcgttggctggatgggtcaaagagaggggatgctggtcaagcgctcgaggcctctcgactaacgagctcgtcggcggccctgcgagctgaacctcaaccaagacctcaattgccatcagtctgacgacctcgcctcatcctcttcgcctctgacctgcccagttatgagcagcctatcttcgcacctccactttgcgccggcatcagcgtcctcgtcctccacacggtcgccgctcccgccggcaggcagcagcctcctcgtcaccgacacgctcgcggcctcggccgactttgtcctcctgcacctcgtcgctgcgcagctcaagcggggtaagcaggtcgtctttgtcggcctgggcgaggcggagggtcactggcgggcgcttggaaagaagctcgtgagtccctagtcaccgctccttcgttggcagcagctcgctgacgctactgctgcgtgccggtcagggcacctccctcgattcaaacagcaacttcacctatgtcgacggcctgtcgcggacgtatgcttttccgttacccgccgacgttccgccgtcggggcagttgtcaagcccgcccgtcctgcaagacgacgcggccctccgaccgctcttcgacgtcgtgcactcggctctgaagggcaaggcccgcgccgtgcacaagacggaggagggagcagagagcgatactctgctcatccttgaggggctcaattcgctcgcttggagcggagcaaagggcgacgaggtcatgcggctcgttcgggccgtccagcacttgtcagaaaaggtgcctccgcaccctatgtgctcaatcgcctctgcatcagcactgacctccgcattggcttcgcagctcgcgttcgcatccgtcctgcaccttcatacgacgccatcgctaggcgcactgccgacggacgagctcttccagatgctccatccgacggccgacctttggatccaagtgcgcggcctcgtctctggccggagcgccgacgtctcgggcgaggtacgtcgatctttgtcttaacgctcggccaaaggacaatctaacgtactcctccctcacagctcgctttcttcccgtcaccgcttatggccgacgacgcagccttcccggtgacggtcagcggcaaagagcttcagtacaagctcggcgactcgtccgtcgacttctttgcaaaggggaccggacgtggtttcctctagatgcgccttgcgtcgcatgaccagcctttgacgtttcgaggttcgtcaaggtcatgcagagggtaacgggaaggggagttagaaggaacgtcctgaggtggtgtacatcaaaaaggggtggcccgcagcaccacagattagggtatggggggtaggagcgtagtctcgtcttcgcggtctcttcaagccgcagcggaggcggcatgggagagggagctggcagcggcaaccgtcgccttctttgccaaccgggaaagaagcggcagatgggcgtcctcgaggtcaaggatattgactgccgtcgggcgatggctatgccgggaagcagacggccggtgggcgtcgtggccagggtcaaaccccacgagcgacaggttgagggcgaccccgtcgagttggcgtttgccgcaagagcaggatgtgcaagcagcgcacgagtcggaccatggattttgtagctggctgacgggcgccgtggatgaagacacaatgcaagggagcatagctctgtctggagctgaagatcctggcgtcacctgcgacagctgccatgatgcgagcgaagacggaggcaatctgaaggagtcggtctctggagtgacagcgtccagccggtctgccgttgagaaggcgttcgattcatggcaatgagcggcgtcgtccgccaagatggcgagacctcgcagagcgttggttagagagtcggcctgaagggaaggccagaggcagccatcagtcgatgccgcgcagcagatatgagtgcagcgtgcaagcgtacctcgaggacaggaatcgggcagcctgtgcggccgagcgaaggagaagcggtcatgttgtccttcaggtcttcacgctgggaaggtagccgggaggggctagagcggccggatgaaggccgaacggagacggcagtcgacctgggaagcaacgtgaataaagggttgggcctcgtcgcctttttcaagggggtgcggctgttaaatgaggcggtagcggagacgtgatggtgagatggcaaggtcaaactgagtgccctgccattcgaagtgctgggagagtcctcgacggcaattcgaaggtcaaggagggcggacgaagccgttggaagtcggagcggaggaccgagcggtcggctcgggtccggtcgccgaccggccgacggcaccgactttagctggcagcgagaccgtgctcgacatgctgaggaaagagcaacggtagagctgccaggtcgcagggaaagggtgctgcaagcgatggacgatagacagaggtctgtgctccaaaaaggcgcgatgcaggatttgaacccacgacctcctctatttccagtcctaaccgggggtgtgacccgaaagaggtatgataccactacaccaaccacgcccgatggacggtaatcttccgcgtgcgttcagattgttatccaaaatgaggtcaagcaaggatgactcctcgctccatcgtcgctggtgctgatcagaaggagagacggcctgcccgttgaggcacacaggcagacaaggggtagtcagggaatgctgggtacggtctgagggcatgattggtgccacttgtgcgcagtcctgttatgaccaccctgcatcgctgccctgcctcctcaagcgtcgcgctgagctgtcgcgtcgacaggcagtggattggtcgaggagaggtcatgggatagggtcacaagatcgagaaactgacacggctggcgacaggcctaaagccggtcctcgagggtgcaagccttctccatcttgcgctccttaccgagccgggtccggagccggtccatccgcccctcctcgcgctcgaggatccgccgcgcctcctcctcctcggcgccgccgccgtgacccgagccaacgaggcccttgacgacctcctcctcgaggcacgacagctggacgacggcgttggctggcgtccgccgcttggcggggctcgtctggtcgagcgcgacgagcgcggcgtcggcgaggagggcgagaaccgtgtgaaagtcggaagggctcagggcgttgatcggcgaatcggacgacgagaggaggtggatgtaggtcgagaggagcgcgccggacgtcgtccgctcgccgccggccttgaccgccgcagacgccgacgccgcggtcgagccggccgggcctgccgcgagcggcgcgagcccaagcgaggcccggcgcgagtggatgaggagtgccacgaggacgagccgcgactgaatgttgagcgactggatcttctggaccgtgccggcattgaccgtcttcttgctcggcgtccgcgggacgccgtcgaccgtccggatcgccgaagcggccagcccaccggccgacgatggggcaccgctggcaggcccgcgcgacgtacaggcgacggatttcgccttctggagcgccttaaggacgtgcgtcatccccgccttcttgatggggacgatggcgccggtcggagcggtaagcgaagccttcttccattcggcctcgacgagctcgaccgcgagccggacgacgtcgaggcagagccggaggtcgccattctcggccatgaccttgcgtgcggcaagctcgaccgccttctcctcgacgacaagcacctgctcggccttgccgtccgctaccggctcggtcagggccgcgagccggtcgaggatgatggccgacatctggccggcgtcgtatgcggcaaaagcgagcgtctgcggggggcaaggaagcgtcgcgaggtagcggctcgcaaagtcgagcgtattggagatggccaggagggcgagattggtcgttgccgtcgggaggaggaagagcgtctggaggaggagaagcgagggcgagagcatcgagggcgaggcggtcgatgaggcaccaccggctgaggacgcgacagggacggcgacgagcgagtcaagctcgtcgaggatgagaatgctaagaacgagtcgaaaagagcagatcagcgagcgcgaccttaaaatgagaatcagagacgataagacacgcacaacttccttcccttgtcctgcttgagccgctcaatgacagtctccctcccgccgcccttgacccaaccgtccgccccgccctcaccaaacagctcctccccgacgcgctcccacatggccctccccccaggcccagcagcggccgtaaagcagttgacgacgccgacagttgtcccctttgcacgttcctggtcggcaagccgcgagagaagggccgtcttgcccgtccctggcgggccagagacgtacagcgtctttgcgatctcgcgcgctttggcccgcggaggggcgagcgccggcgtgagaaagtcgaggatctggctgtactcgaccgagcgcccgatgagcgcaccgccgccgtcgctgccgctggtgtctgggtcgttgaccgtcacgtcgagcttcgaggcggcggcagcagcggcggcggtcgaggtcgttagcgtgcttgacgagcagcgcaagagcgccctcgcccgcgcatagagcgacggcttgagctccctccggaccgcaacgaccgccttggtcggcgtcattgctgccggtccggccgacgcggccctcgtcgcctgccccttggctggcgtcttgggcggcgtcgcgagctggccgttggcatgcgtaaactcgggcatcgtccgcgtccggacggctgacgcccgcttcggcggctcgggcgtcttggtcggggacgggtaggtggagtaggaagaggaggaagaggcggcggcggccgagcgtgtcgtcggcttgatcggcgtagggaggcccgacgctgtgaccggagacgtcatgacgacgcagtcatcgccggcgatgctggaggtcgacttgccggcgtaggacgtcggaggtgaggaacgagcgagtgcgaaagacgaggacgaggctgacggtcggcgacgcatttgagatcggttgagtgaaggttcgcggtcagtaaggtgcccttggacgcgcttcaccaccgggctggcgccacgacaggcgagagagggttctgcgaagacgccaacagcaggagaagacgaagacgcacaagattctgagcggacgatccgccgccggttgacgccgttcgcgccgaggtcggccgtcgacggcgtccggccgcgcttgagcgtcgccggcctcgcagtcgcagcagtggcggcgggcgggatgttgagctcgtcggcctcgtcgtcgctgctttccggaccgttactcatcgcgacgtcgccggcctgataggcgttgccgttgccagacgagaaagagccctcggacggcggcggtatgttctctttgccgcgacgacggccgctgccgagcccaccgccgccgccgccgccgcccttgccctttgcgctgctgccggccgcgatgggaccagtcgtctggccgcacgagatcgacgacgacgaggcctcagcctgctgagccagctgtcgacgcgtcattggcctgccgggtgttgccggtgcctgggcgagagtgaggaccggggcaggcgagggcgagggtgccctttgttcaggctggagggacgacgtcgacgcggccggcgaggcgggcagggtcggctcgtcgtaaggtggtgggagcatggtaggagagtagaggagcgggaggtgacacaggaagagaagagagagtaaggaggagaggggggtagcgcagggagaatggggtgaaggtgaaggtcgacggacgacgcgcctccttcgcgcgcgcgcgcgagatgagcaagagaacgcgacgcgcagctcatttcggccgaccggtccctcaacaatttgcagcaacgactctccaagattagctgaaagtagtaggcccagtccgacacgcgagtccatgcagatcctacaagacagaaggattcccgcctctcacatccggccatgctcgcgcttccgccgccactcgtcgacccgctccttcccgccataccgcgtccagaagacgtaggcacccgctccgactgcgctcgcgaagatgacgagccagaacgcgccggacgagacgccgagcggcgaagggtcgatcgacgagagagggggcgaggcggggtgcggggcgtcaggctcgtcgtcggtgtcggatggcacctggcgggcgtgcagaaaggcaagacgaggagaggagaggaggaaggagagggcgtcaggaacgcaccattattgagtgagggcgctcaatttaaagctcggcgcggagaggcacctggtttccatcctcgtcgacgacgggctcaatctcgagctgattggagtgcaaagaggtcgagagcaggaagtcagcgtcactcgaggggagtcaaagatgactgagcgaagacgtacctcgcccgagtcggcaatcgtcacgtcctcgacgggcttgtcgccccggcccttagggacagcctcgatcgccttgatgacgtccatctgcaggagatctcaaagaggaggtcagtatctgcagccaagagtggcagaccggaggagaagaacgaacgccgtccaggaccttgccgaaaacgacgtgcttgccgtcgagcctggcgagtggcggtcaaaaggtgcgtcagccaccttagccatccagagaaagcacgacgccagcgccctcagaacgcaccagctcgtgacgacggtgcagataaagaactgcgagccgttggtgtcgcgcccggcgttggccatcgagagcgtgccggcgcccgtgtgcttgagcttgaagttctcgtccttaaacttgtcgccgtagatcgacttgccgccccgaccatcgccggaggtaaagtcaccgccctggatcatgaagttggagatctacgggcgagggggaaagggcgaggtcagagaggtagagggcagggaggcaagggggggtcgacgacgcacgacccggtggaacttcgagcccttgtagccaaagcccttctcgccggtcgcgagcgcacggaagttctcaaccgtgatgggaacagtgccgccgtagagctgcgaaaggtgcagggggcggcagtcagtctccggaactagcggtcggcggtcgaacgggcagggagatgggactggaaggaggacgcacgcccatagtgacccggcccatcgggcggcctccgtgctcaacgtcgaagtagacctgcagtcgcgatgaaaaggtattcgagtcagccataagactcagtcatgagtgctggccgacttcttttgatcgggtgacagctcagtcgggagggctgggtcggcgcgctgaccttgtgcgtgatcttggggcccttgccagcggcctcgacggccgtgttctgactgaaggccaggaacgagaggacaagcgcggcgagcgcgaggaagacgttgcgaaatgtgaggagggacgccatctttgcttgaggtttgtggtgggagagaaaaggagaggagatgtcggagagacgcacaggcggacgccgccggcggtgcagagcccgttgctatgcgtgaccgggccttgacgacgacgacagaggcgatacgacagcaggcagtgtcacacgggaggagaaggcagggacatggtacatctgggtctgttgcagtcgacagaagcccttgtatagccgtctggccttggcatgcagtgcgctgtcggcctggcgggcactcggggagcctgctcgaccccgtcggttcgagtgcgaccttttccctggcgacctttcacaggctgtcagtcacccgagcaacacgtatagagcgctgatttgatgagagggtgttcgaccagcgttgcttatgcggggcggtatcgaccgttcaagtgtcggcccacttctcctcgacaacctcgggcgcctcaatcagctggccgacgacgtcgcccttgaagccggtgcacctgcagatcaaagccgattgacaggtcagccattgcgcccgccatacacctaaaatcggcccgcaaaggaaggcacgcacacccagtagacctcgcttgactctttgcgcgacgcctcgggcttgaagacgacgaccttgtcgaatgaccggtcgaggaacgtccgcttgaacgagtcgagctcggggtaggtgaagagcttcatcctgcgagtttgagagagttgtagggtgtcagtcgactgctgataggtagcgaagggagggagggattggaggacggacacgaaggtgccgcccggccgacgctctccgctcgcaaagatgtggccgactcgcaagcccgttttacagaacctggcagagtacatcagacggggcgcccatcagcgagccgcacagagcaccaaagacgttgaaggacgcactcgtagcacgactcggcgatctggagggccgcttcggcgtccttcgtcggcgagccgctcacgtttgcggccactggttgcgagtggcgagaggtcagctgacagtccgtcataaaaactgctgcagccgctggactcactgtcagacagcacgagatcggccttgttgtggccgttcttgccaccctctgcgacgaggtagtcgcggatccgcagccgcgtcttcgggttgagaaagtcgcccttgatgaagtgaacgcccgggaccttctccatatcgagtagatcgacggcaacgacggtccgtgagcccctgccggcctgcatgaggacctgcgaccagccgccgggcgccgagccgaggtcgacgaccgtcttgaccgagtcccgcaggaggcggtacttctgcgcgagcgcgaggagcttgaaggccgcgcgtgagcgaaaggagcctcgggcggcgacgaaatggtccgtcttttggcgggcaatgtaggccgtggacgactttgaggcggctgagcggacggaggggacgatgggcggagggagttgggcgggagtggctgcgcgcagcgcgagttgccggccggacgggaacaggaggcggagagacatggggtggtgtgttcgaagcgaggtggaatgagtatgcactgcgccataaaagaaggagacgtcagtgaggccgggcacgagccgacaccacggtcacagaagacgtacagtagagggccggtcgaggtcggcgccgcgcggcggaggttaggagaagccgcaggtgagggaggtccgaaggtctgtatacttggcgagggaaggcaatcagtgactttcctggcctgtactctctctcatctatgtacaaacgcgatgactgccttcttgcttggggatgcaccgagtgggtcagcaaagagcgagctcgccgttgcggggcgacctgcggactcggcggcggcgactctttcgggcggcggtcgctcccgctcgaccctgtcccccgaaccacgactctcctgctcgccctccttcagaccactcttagcaacctacgacccagacccagccagcttctttggtctcgccattagcaccagccgcccagccaagtcccgcctctcccgcatgcgtccctcgctcgtccgcttcatccggccggccgccctcccgccggtaggctacgtcgacccccggacgctctcgtcatcgactgtcccaggctttcagcactttaaccagccatgccggcggctcgagtttgagttccaccagaacgacatccggggtgagggactgaggtgcggctcgtgacggtcggtcgggtcgggagggagcttcagtcggcgctgcggctgtcgactcgcccgcttgcccctcgcccggccgacttcgcgtcaatcgacaacgactgagctgacataatccatcatgttgatcgtagggagtacctgaggacgagcgtcgtcaggctcgccgagcagaacccagagaccgaggtcatcgtccgctcgatccgaggcacgtcagcaccggtcgtccgagccttctacagtgcgtgccgtccagctcctctggcactgccaggagcctcgtcgacggctggcagtgtcgttgctgacccgtgagttgccttctgctcgtagcgaccggccggaaccggagcatcggcctcgagcagctgcggccagacacggttcgggaccgggtgcgtgctttctaaactcgctcgccgtcactcttgcgaacactcgtctgacgcttccctgagccactcatggatgtgttcttcaggtacgcaagcttctccaccactctggcgagaagattgtcgagctcaagcgcaagacgatcgtcgccagcccgcacgccgagagtgcgcgcggcgtctggtcgggcgtgcacgtccctcggccgttcgacatctagggttcaccagtgagagcacagatcgaatggctcctcgtttggatcgtgactggcgttgagggcggtgacgggagagtgtgggcgcacgtcacgccgcctggtcgccggcgcttgcgatttgaagcgcaaactgagcgcaactgcaggctagttcctcgaagcgcctgccagtgttgtccttcacgctgcttgtactgtaccggctgtcgaagagctgcgaggggagtttgcgacgggcctgtcgttcgaccggctgaccttgcggcgcgtcgctgcgggctcttcgtgttccctccgacatcgacctcgtcttctcagccctgtcgctccctccttctgaagccatcttcaagtccacccttcccccggtcgaaggcttcagcaggtcacgcaagctggactgaacctacttagacgcgatgtcggacgatcaccatcatcacgacgagcatcatcgcgatggcggcggcaacgagcacgactcctcagaacacgctccgtcgcctcccccggccgctggcgagccgcggtcgtcttccgagcagcatggcgagcgccgggaggacggccatcaggagggcgctgatggagagcagcaggtacgttcgtcggcaacctgcgtgtttcgacgagggaggtccgtccgtgatggcgagcttgcgatggaagctgacccggacccgtctgccgcccgaagcagcctccgtcggacgatcagtcacgccctgagcagcacgcagaggagcactcggccgatcagtcgcagaacgagtctcatagagcagagacggacgacaccacggtgcgtggccctcctcatcacgttgagggcgcctcgcgcaggcaggcaggcccctgacgtgccgccgaccgctgaccttctgcgcccgtctctacccttttagccagtcgagcctcccctggcggctctcgactctgcggagacgccacggattccggccctcactttgacgaccgaagctgcgtcgggcgacaaggccgagggcgagcacctcgagccccgcgacgtgacgccgtcccggccgctcccctcgacgatcctctcgccggtggcctccccgcaaccccaatccgacctgacggcagagctctcgcccgactcgcccgactacgccctcgtcactgctcttaaggtccagctccgggcggtcgaggagcagcgcgaccagatcaatacgaagcttgtgcgcagcctcgagcgctgcgccgacctcgaggatgaggtcttccacgcccaggacggcgaccggcagaaggccgccaagatcatcacgcttgaggaggagcgcaaggagcaccttcacgctctcgagtgcgtcaactctcattcttctcaacaaggttgtgtcaagaactgacgccacgaaatcgccgtctctagcaccggcctgctgattgagcaagccaacgtcaagaacgagatgcagcgccttgcatcaagcttagctgaggctcagggcaagcgcgagctcgccgaggagggcaagcggacggttgagaacgaggtcgacgatcttgcagcgtcgctcttccagcaggtgcgtctgaagcccgtcacggcgtcagagcatcggtcggactcaatgacaccctttatctgttgccgcaggccaattcgatggtcgcgacggagcggctcgcgcggtctcgggccgagacgcggctgaaggaggccgaggacaacctctcggtcgccgagagcgttgtgcgtgagatgcagcaggcgatgcaggacctccaccacagcgccaagtcgcgcggcatcacctcgtcgtcctcgatgaactcgctcatggccctttcggcagttgctgaggcggtcccgcgcccgctccggacaacgcacctgccctactccgagttcctcctctttgtccaacatgtccgcgctctccggccgctcacggccgcctcgatgacgacgccggcccagatcccgccgccgctcatgacctcgctcctctcgcagccactgatggcccggctgctagccgaggaccacgacccggctcttcgactcgactttgcgcctggcgtcggttggatctcgcgcaaaggcatctcgaacgcgattgtcgagggcatgctcatggtcgagcccgtcagcgtgacgaccgtctttgcgcagcggccagacgccgacattgtctgcgcgctttcgggcaagctcatcgtccaggccccgccgtcgaccgtctcctcgagctacggctatcccggcgagggcgtctttgcgcttgcagctgccggcttaccaatcgcgtccggcgcgccgccgtcgcattccttccgggcgactcagtctcgcttcttctcgcgaaccaactcttcgcggccggcctctccgacgtcgtctggccagtcgacgtcgtcgaccgtcttcgtcttccggatcgccccgccgtcgaacgtgccactctctgagcagaagtcgtcgacgctctacccagtcgaggccggctggtcgctcgaccgcctgcgggcgacctgtgagctctggcgcttcgtcaagacgggcatcctgcatcccatatgggcctacgaggacggcacggagcggccgccgactccggccgtgcagcctccgcaggccgagagcgtcgcttttacgactgctgtcggcaagaagccagagctgccgccgaggaagaagagctgggggctaggcagctgggggctcggaaggtcatcgactccgccgccagcacctcctccgcaggccgctgcgtcggcgcccaaagtgccccctcgtcggctgccacctcccgtcgtcgaagtcaaggaggccgagcaggccgagttggcgccgccagtcgcctccggagtcccgtccgaactgaccgacgcaccaaaggaggctggccttgtcgagaaggaggcgcccacggactcggttgtcgacgtcgcaccgcctcccatcattgagtcgtcttcgatcgacgccgagcactctgagacaccgacgcccctcgcaaccgaccaggataatggaccgaaggaggcgcctgccagcgacgacgcatcgcagccggccgcaaccgagtcgggcgagggcgagtctgctccgcaagagtcatccgcagagggccagcctgagccggcgtcagcaaccgcggacgacggcggcgagtctgactcgttccagacgccgaccgaggagacggagacgcacccgatcgacaaggagctgtcggatgcggcggccgagggcggagtggcgggagtcgagggatccatcaacccggcacccaatgatcccgacgagccgccaaagacggaagaaggcgacgtcgccgcctctaccgatgttgcgcttccagcggcggccgaagagccggtgacgaatattgacttgtcagccgccccgccggacgcgaacgataccgatgccgagcgcccatcgatcgacggtgtgcccctgactggtgcaccaccgccccttcctcgacgagcggcggcgcggcgaccaatcccgcctcctcctggttcggccggggccgctgcagcgcagaccgctagtggcgattctcccgctagcacgggcgtggccaaggcagacctacctgcccgagcgtcgctcgacgggtcggctacgtcagcgctgactttcagcggctcggcccctcctccgcctccgagaccgacacctgcggccgacgatgttgccgctgctgagaaggcctcgcctggagacaccgccaagccggacgaggcgtcgaaggccagcgagtgggagcttgccgcttggcgggagctcgcggccgtccgcgagcggctgttttggatgcggatcgggcaggagccgttgtcctgatctctgatgatatccataggctgaaccgtttgcgagagtaagagtcgagcaagaggattgccggtcgggttgctgcgcggacgctcctctcggagaagagcggcgccggccctgtcaaccttcagcccttccgaccttcatcacccagcgccttgccgcaagagggccatgtcgatcctcagccctcaccagacgtacgacgccctcggcccgttcccgctcggcacgcgcgagctcccgttcctctcgtcgcccctgcacgccttcggctcgtcctcggctgctccctgcccggtcgacccgttcctcaccctcacctcgcccgtcggcaaaagctttccctcggcgtacggtatcaacggctcggcctcgtgggcgaccttccaacctgacgaccagggctgggtcgatgtcgagtgggtaccgccgctcgtcgactgggtcggcctccgccggaccgagggttgggctggcctgcagcatctctcgcttctacggtccgagctcgacgtcccggctgcagcagattacctcgggctgctcgttgagggccatgcatgggccatcgttccacaagaccggctcgaggcgcccattgtttggcatactggcgacatctacgccttctcaaaggggctcgaaggcgagcggccgccgccggctgacgtctacggccaggtagtcagtctgagcgccggaaagcattggatctacctgaaggccctgtacgagattcgtgcgttccctcgccacctccgtcgttcccctcgaagtgtcattagttgacaaacggcttcccatcgcaggcatgttcggcgatcccggcgcccgcaccccgaccatccatctgaagttcaccctctcgccggttgcccctttgactgctcaaagcatcactgggcatgaacctcctagccagaagcccctccgagctcctacacggagacccgatgttcaaacatacggcccttcggcgggcatggccggtctcggcgacgtcgtcgacggctggatctggggcaacgtcgcaggggttgccgttcgagccggccgagagccggttgaagtcatttcggtggcgctccagacgggtatcgaggtgcgaccggtcgtatgctcgctacgaccctcaaaaatggcgctgatcatccactgtgatggcgcttcatgcaggggctgagcgtgtcgctccgatcgccgtcgcaagtggcgtcgcaccagctgcggcccctgacactcgaaatcaatcagacgaaaatgctctcgtcgacagtcgaggacatccgtctcgtcattgccaccagcaacggcaagctgagcctcaccctacccatcactcaccgggtcaaccagctcctctccaccgttcgcttcgtctaccgcgaccgcgacgggacggcggcctatgccatggctcgtcccccctcatccgacaaaggtccacaagacgcggttgtcctcgctctgcacggcgctggcgtcgagacgagctcggccttttggacaaacgcggtccgtccccgagcgaggagctgggtcttgttccccactggccgaaccgcctggggttacgattggcatgcagctagcgccgagaatgtctgggcagctcgtagggagctttcgaggctcctcatgcgactcggcaaggagccgctcagcaatcggaacgtcatcgtcggccactcaaacggcggccagggtgcgacccatctcttcctccatcacccggacgagtttcagggcgcgctctcagcggccgcgtacaccaagatccaggcctatgtcccttacacccaatggacgtcggcgcaccatctcgatccggccctttcgggcttgctcatgacgggactcgcaggcaacgacgaggatgtgctcgcgtcaaatggctttggactcgggcgagcgctcgtacacggcagagaggacgataatgtgagtggctggctaggagagagcgaagcgtttaactgacatcctcaccccctcggtcaggttcccgtctggcacggccgcgagatgaacaacctccacgctcagcactctcacaacgcgagcctcgcgacttcgtcagctgctgtccaccgagtctttcagatgtgacgggctgctgatgcgacttaccgcgctcttcctgcagctttgaagaggttccggacgcgtcgcattggtttgacggtatcctcacctcgcctttcgttgaatgctttctcgccgagcacacgcccgccacgcttgaccgctatccgcccgtctacctcacccagggcttcgagctcgtcgtcgccaatccgaacgaacaatgtagcaagggcggcttccgcattactcaacttgaccgagtcggcaggtggaactgctctttgaccgcttgctcgaggtgcaagcgctgaccttgttgaacacttgtgaccggcttacagattcgccaggcttctcgtcggacctcttgaggacgacggggtcattacaatcgccgcgaggaacgctcttcgcttcagtctcgaccgcatcaaggctccggtacatctgcgcgatgcgacaaccgttgtcgtcgacggccaacgtctaagcctaacgtcgaatgcaggagggcaaaatccttcaggcatcaccttctatcgaccggatcgactctcgccatggaaggttaccgctgaggccaatgccaccctcggccccgttcgtcgctatgggccgctcctttcaatattttcaacaacagagccgctcgtcatcatcgttccggagggcgtagagcatcacgcaggaatcgcccggcggatcgcgcacgacgcctgggtctacggccgactcgacgctcgtatcgtcgcggacgagcaggtcaagaccgagataaaggacgaggagaggcaaagcggcttgcgcggcaactggatcgtcatcggcggcaatgagaacggaatgtctgggctgcttgtctcgacaccttgtaggtcgcaagtgcctgctgaacgctggtcaacgggaagctgacgccctttttggccctgtcgatagtgcgcttccctggcgctgggctgatcagcatcgagactggcgatggcgaggccagggtgtacgacttcaccaaccacccatcaactggagtcttggcacttcacccgcatccactcaacgtcgagggcctcgcgcttgtccttgccggaaccgacgcaagcggactcgagcgcgcctttcgcctcttccccgtccgaagtgggtcgccgcccttgtattcgctcgcctcaactttgactgactctcgccatccgcccgcaaccggcaccccgagcctcgactggatgatgatcggccacgaggccgactggaggggtgcgggcgggctcctgggcgccggctggtggaacaacgcctggggctgggaggaaagtgggtcctggctgtcctagagcggcaggtcatgccgatgttgtatgctcgtttttgccttgtccggtcgtcgctccttctgatcagggatatcgcgggcgcccacccgcagcgaacttcgcttccctgcctctcatccgtggtattaatagagtttttaagaattgtgcaatcacagtggcgtggttggtgtagtggtatcatacctctttcgggtcacacccccggttaggactggaaatagaggaggtcgtgggttcaaatcctgcatcgcgccctttttttgcggacgggacctctgtttgtcatcttgatcctctgagcggctgtgcgaggactagcatgaagttctctttctcttcttcacatcgcttcggtcttgcgcctcttgcagcgtctcagcagaccatctgcgatcgtcgaaccacaggtggctgacgcctcgcatccgcttcgcacttccactgccgcagagagagctgcaatcttccagtgcgcattgcagcagagcgacagcaacagcatcctggaaatcgtacatccacacaagacataagttgcgggcatcggccctgcccgttcaaaagatacgttttctgatgaaggccaaagttcagaagtcagcgcgacttgaggagcaagacgaaaagccgcgtgggatcggacgcacaccatggtccagcgagtaacctcctcgagcttgaagcccttcttcttgccgccggctggcgccgctggcgccaacttgggctcgctagcgatggtcgaattggtctgaaggataagagatgggccgttgctggcgccgagttcgttcggaggggcaatgtcatcggccttgtggtcgacaagcttacgaacgagcttgttgtactcctgccggttgcgacgggagacagggaaaacacgtcagcgtagatatgttggacggcctgcgacagggcgaagcaacgcacgcgctcgccctcggcctcgcctaaaggcgaccttgcgagctggttaagatcctcgtcctctgccaggcgggcctccatgccggcgcagcgccgcgtcgcaaagttgaggagactaataccgaggatgatcttgaaggcgacaagacagacccagcagacgagactgccgagcgcaatcccggcccagtggacccttgtcgagtgccagaagtcggtgctcggcgcgctgccaaagagagcaacggatgcgccaggtgtgtcgaagacggcttcctctgcctcgccgtgtcgggttgccatcccgattgcctgcatcaagacgcggatgaccagacaggcgagagggagcgtcgcaaaaccgagccggcgcgacacgagcggtgacggatcagagaagacgcgctgcaagtagacaagagaattcggcatgagtcttgggtgatccactcatctcgaagatacgaggacgcaccttacgaccggagggcaatccacctgtaccagccgtgacgagatcgcggcacaggacgtcggcgaagcgctcgtaaacggagacccgaatgtggcttgagcggcaaagagttgcagagagtcagagcaagtcgctagtcaagggtgtcagccgggaacgcacttgaacttggtgatgctgtgtggtggataaccaagtcgaaagaagtcagtccgccgcacgtgctcgagtgcagatcggttggcggacgtactaggcatgcttcatccagtcgacgacacactcgctgccgaggacgacgagtacggggctgagtatcgtccagacgtggctcgacccggccttggcgctcatgctcgtcggcagcgacgaataatcgctgcccgagagctcgatcaggttgcggaaagcgatgacggacagcatcagccagagctggaagcgctcgacgatgtcggcgcaggcgatctggaagaggttttccttttcgaacttcttgaagacggctggcgaaagagggcgagaggtagggatcagccagggcagcttcagagcggtcgtgtgagtcacggatgccactgacagcccttgatctcgacgatctggttgctgacgagcagcgtcaggagcgcattatcgtacgagttgatggcgacgttgagcgaaataagctggaagaagaagacgagcgtgtgtgccactgagaagcgcgcacgtcagctcccgagacgacttgcaggaggccacaacgcttgcgactcacagacgcagacgagcgagagaaagaagaagaagagcggcctgatgtgcggttgcgagccgtttgctcggcgcgagatcgtctcgcgcgcaaacagcgagtcaagcacgtcctgcgaaaaggcgcagcacagcttgtcggcgatctggtgcaagcagcatgcgtcagtgcgcgaccgacagcaaagcaccgctgaaccagagacgtacttcgaaagcaccgtagatgacgacgagcttgatgctgtcctgcccgcggatggcgtggtagatgtagctcgcgtcggtcccgtagacaagggtcgtacacgagaagagcaggaggagagctttaatcatgtcgaccttttgcgtcggcgcgatccgactaagggttcgacgtcgcgagccgtcagtttccagtcgagtggcttcagcaggggagggacgcaccgcctagggcctccaccgaaaagaggcgagacgtaagtcgacccgagcgcaaagaaggcaagcagcgaccggatcgggaggatcgtgaagatgtagaggaacgagtcgaggcagacgagcgaaccgaagccgatgatcttctcgatcgccaacgggacttgcagaaagttggacactcgctcccctgggaaggccgagggaggtgcggtcatgagagacaaagacaagagaggcagtggctaaagagaaaggcgacgtacacttgaggtcctggcccgactcgtaatcgtttgcccaaatctcctcctgcaggtgctcccacaggctacgcttcttgggctcgacaagttgggatggaagcgtaaaggtgtcgtccgtctttgagctttcgaatcgctggcgcagcaggccgatgtcgagcgcgtcgggcgagagcgcagcttcgggcgagagcagcgagacgaacgaccgggtcgggcttgacgggagagacgagtagccgacgcgctgggctggcgagagaggatcgccatcctcgccgtcctcgtcgcttcggaacgcctgggttgggctggtcgagaacctcgccggcgacgagggtgtgtgcgcgtcggtgagtgagaagtggggtgagagagggaagagcgtcgatggcagcgacgagctcgcgccgagcccggccggctcgagcgggtagtgcagcgcaggtagcggcgagctcgggaaggcgatggacgacgggcttgctagtggcaaacgaagggagccgaggacaggcgaggctgacggtgacggcgtcggcgagggcgaggggtagtgagctgcccgggcagggatctgtagcgaagagggaggggaacatcagtgtcaatgactctcgtcagcagctgctggatctgagctcaccctgaccggcgaggtgcgctctccgggcatggccctgatcgtcccgagcgttggctcgctcgaggtcctttacgcggagggagctgcgggctggccagggagggcatcagcctgccacgccttcgctcgctcgccagcgagatcaactaacgtagtactggtccaagtttggcttccggtacgctcttgataggccgatcaactaatgttgagggtcgtctgctgtcgagctcctggcggttgggaggcagccgacggcgcagcggccgcagaggatctcgacgatgcccgtcaaccgtcatgccgccgacatcgctcgaccggcgacgagctcttctgcgtaatcgacgagctcatgggtgcagaggccgagcaggacgtactgatcctgtcactctctgagctctcagcccctcagctgattcggtcgctcaatcacagcatgcgcgcggtcagggacctctctgctcggccgacgcgccagctagcaccaccctcaatctcgccttacgtctgacggatctttcgacgggaggcgtcacaggttttcggccagcgggctgagaggtctgcgatcattccatctcaggctttggccgtgcctccgcaggcgtatgcgagctctggattgcggctcgccagatcgacctcaactacgacaacctcaggcggatagtctcgggtatgcatggcatcgccctcgtgctatttcctccgcgactggtggaaggcaagagccttgtcgacgctcgcaagcgtcgtgttgagcgccgcccgaacgcgctcgcgctcctcgcctccgcacgagccgacgagctcgtccgcttttccacggaccttgcggaggagaccgaccatcttatcgaccttctccttgcgctgagcgtcggtcagccgggcgccgaggtggtacgacgtcgagcctgcggcggagacggacgggagcgacgacgctggcggcggggggaggatcgaggcgtaaaactggcgcaggaattcggtcgtcgaggtgtgaagggtcgtcagctgatgaagcatcgcaggcgggattgcgtctggagcgagcgcaagggcgaacgcgttcagccagtcagccgaggatcggccacgccgtgtgacatacaaggacgcacccttgttcgatttagcgtcgaggcgagagcgcacgctcgacgttagcgctgccatgacctcctccgcggagcgcttctccagtcgggtctgttgagcggcacttatcagcaagccatggaagggacaaaggcatagtgtcatgcgacgcaccgtgttgagcaccgcccgccagccacggaagccgtccttgacctccgcagcgatcagagccacctcgtcggccgtccgcggtcgcttgccgttgctggggtcgccgattccgttgcctgcgtcggcgccagtcccactaccgccgccctcgaatagcccccgacggtcgctcatgtcgaggtcgaggccgatcgccctcggagccgaggccgtgttgagctcgggcaggtcaatctcggcgaagcgcgactcgtctcgcgacgatgcgggctcatcaatgcgaggccgtttagcaacccgctcatctgacccagcgtgaggcgtcgagctctcggcgagcctgatggtcgcggacagcgaagcaggggtcaggaaacggccgcgcgcaccgtcagaggggaaaggatatcgcaccgagtcgaggcggaatcgctcgctttgaggagcttctcagagtgctcgttgaagcgccgcatgagcggtagacttgcgcgctgcttgccggcctgcatcgtgatgtccttggcgttgcccgactgatcaagggggggggggcagtcagcggcggagaagcctggtctctgcagtcgctgaaatgtgacgcacgtcttcatggtcgacctctgttgctgcgaggtcgaggaagcggttgacgacctctgacgacttgtgctgcggctcgatccctggtcgatcagaggcgtcagcaacgtcacagtctgctcggctcggcaagcaaagccggacggaccatcgtcaacctggccgaggtacttgtcaaacatctcgtcctccttggccgtccctttcccgccgctcgtccgtgcgctcgcacgatggcgctcccagaggcgcgagttgaagtagcgctgccagaagaccggctcggtgacgacctgacccaaggtaagggggcgcggccgtcgcatcagcatccaagtcagctggtagagagacacccgaggcaatcgcacctttggaacgttctgcttccacgcgaggtggacgtctggaaactcgtcgaagatgtcgcggatgagctcaggcgtcaggctgatagtgcccatcgcgttgcccttctgggcggcttttgtcgtcccctggccggtgccagatgtcgtcgccgagctcttggaggaggaggacgtccagcggtcgtcgatcagctgagacgaccggccgggccgttgatgcgacgaaagggactcggacgtgagaaggagctgcgcagcggcgaatcgcaggatgaggatgagctcggccaggacggggagagcctagaagggctttaacgcacctcgcgaccctcccaaaactcctcgtcggtgatctggccgctctgaacgagctcgtagtggagcgcggccagctgcgggttcttgacgaggacgcgcttgtgcagctcccagtcctccttcaggttgcggcccttgccctttgcggcgctcaatgaggtcgaggactgggcgggcacgacagccgacttcgacgacgtcgatgccgatcctgctgctgacgaggaagaggatgcaacggccgctggcggctggttcgggcctgctgctgctcccaccgctggcggaggtggaggccggatgaccggcttgacgtcgaccggctcgacgcccggcgggccagccttgtcgagccggttctgcgaggcgacggttgcgaggatgttcttgagcttggccgcatcctcctgggccgtcgccgggtcggtgaagttgaacgtgacgcccttgtcgcccgtcagcggcgacgacgggtagaacgtcagcttgaggttgtgcttgcccgtctcaggcttgctcgcaaagagcgctgcaacacgatgccccatctcgacagtcagtcctgctccgactaacgcgctctcctgatcaggtcgacgtaccgagcaccttggacaggctctccgagaaggcgctagcctgcttggcccccggcacaggcgcggtggagggcgtccagcggagcgaggctccgtcgagcgtcagggtgccggccgtcttcttgtaggcggcctgggccgaggcagacttgctgctcatcacagtagtcgaccgctgatctagaaatctgctgttggcgaggttctggcgagtcttggtcggcagggcaaggccggctcgaccatcacattcgctttggccggagcggcgacgacttgaccctgaactgcatcctcctcctcctcctatccaccctccatccagccagcctctcttgcttgcgccaaccatgggtcgctcgcgaacacgctcgccctctcccggctactcgtcatcgaaacgctcgcgctacggcgcctcgtcctcgtcctcgtacgccgccggcgttccgagctcgtcctcctcttcgcgccgcgacgagccgagggacggccaccaccaccatcacgatcgcctcgagcgggactcttaccgcgagcgcgagcgcgacagcagggacggtcgcgaccgtcgcgagcgcgacagggaatatgaccgcgaccggttggaccgccggcgtgggcccgacgaccaccactcgcaccactcctcgtcgtcctcgcgccgccgggacgacgaccgcgagtcggcttcgtcgtcgtcctatcggcggtacgacggtgaccaggcgccgccctcgacgtctagcaggcacaggacgcgctcaaggtcgcgcgaacgcgctcatcacccttaccagcctccgtctcccccgccgccgcccaaggggccgacggccgaggagctcgccgaaatcgagaagcggcgcaggcaggaaaaactcgccctctggaaggccgagcaggcagccaagaaggcggccggttcgccgtcgactccgctcggggcgggcggggcgtcgccggcacctgcgggtgcctcgccagccaccgctgcagctcgcccttcggcaccggcgatctcgggcggcttctcgctcgctaccaaagctccggctgcaaacggccttacccgcgggcttcctctcaagtcgacgccgctgttgctccgaccgcttgcgggtgcagccaagccctctcgactcggcgccgctggtctcgccctcgacgacgggccgacctcggtccgcaagctcgagaagctcagcgacctgccttcggtcgacatgtcggctccggtcggcggcgctggcgcggacgacgaggaagagcacgaggagcttgagaaggagtgggtcgcttccgtcggcggcggccgtcggggcgacgaaggcatcgcacaggcgatggacgtcgacgacccgagctcgcgggccgactcacccgcagagccggctccggcaccagcgccggttgcggtcgatgatgacgaggaggaggaggacccgctcgaggcatatatgcgctcggtcaacacggtcaagtccaaggttgacgccgaggatcgctcgcgaacggccggctcggccccgaaggcgcgcaagctcgggctcgacgacgatgacgagcacgcgtcgggcaacgacagcggcgacgatggcgaggacagaggcgatgtgccactgacggccgaggacatcatggcgtgcgtcgtctcccttttcattttatattgtctgctgcgacctcgactgaccctccctggtgacgtcgcacaggatggctgccaagcgcaaccgccgcaaggacctcgcgcccgtcgaccactccaaggctgagtatgagccgttccgcaaggccttctacacgccgccttacgaggtcagccagatgaccgaggaagaggtcgagctcatgcggctcgagatggacggcattaagattcgcggcatcgactgcccccggccagtcaagcgctggggcgcctttggcctccccgccggctgtctcgagatcatcaagcggctcggctacgccgcgccgacagcgatccaggcccaggcaatcccggccatcatgtcgggccgcgacgtgattggtgtcgccaagacgggctcgggcaagacgatcgccttcctgctgcccttgctccggcacatcaaggaccagcggcccctcagttcgggcgagggcccgatggcagtcgtcatgacgccgacgcgcgagctcgctcttcaaatcgtccgggaggccaagccgttctgcaaggtcctgaatatcacagtgcgcagcccttttgccgctctcgtctctcgacttcggcggctgaccccttcttttcctcgtccttcaccatcaggccatgtgcgcgtacggaggctcgccgatttcggagcagattgccgagatgaagaatggcgccgagctcgtcgtctgcacgcccggccgaatgctcgacctgctgacggccaacagcgggcgcgtcaccaacctcaaacgggtgacatacatggtcctcgacgaagccgaccgcatgttcgacatgggcttcgagccccaggtgatgaagattatcaacaatgtccggcccgaccggcaggttgtcctcttttcggcgaccttcccgaagcagatggacgcgcttgcgcgcaagctgctcgtcaagccgctcgaggtgacggtcggcggccggtcggtcgtcgccaaggagatcacccagctcgtcgaggtccgggccgaggagaccaagtttcaccggctgctcgagctcctcggcgagacgtaccagaccgaggccgatctcgacgagaagcggacgctcgtcttcgtcgagcgccaggaggcggccgataacctcctgctggagctccaccagcggtcgtaccgccgggccaactcgctacacggcggcaaggagcaggtcgaccgcgaccagacgttgacaaacttcaagtcgggcttgatcccgattgtcattgcgacctcggttgccgcccgtgggctcgacgtcaagcagctcgggctcgtcatcaactacgacgtcccgaaccacatggaggactatgtccatcgcgccggccggaccggtcgcgccggcaacaagggcacctgcatcacgtttatcacgcccgagcaggaaaagtactcggtcgacatctgccgtgccgtcgaggccagcggcgtcaccccgccaccagagctcaaagccctgtctgacggtgcgtctggcctgcctttccctcctggccgctacttgtcccgtcttgctgacacgcgctcctcctccaggcttcctggccaaggtccggtccggcacggccaagtctcactcgaacaccggatttggcggcaaaggtctcgaccgtttcgagtcggaccgtgaggccaaggataaggccgagcgggccgcctttggcgaggacgagaaggccaagaagggcgacgaggccggcaaggagggcgagggcgacaaggccggcgacaaggaggagaagagcgtcctaggcagcttcaaggtcgacattgtcaagggcccggcgcccgagcgcgtcggctcgggtggcggccggggtggagtggccgtcgcgccgacgaccgcaaccatccctccgccgctgacggcctcgggcaaggtcccaagcaaggtcgaagccgcgctcgcaaagatcaacgccgagctcgaggccaagcgcaaagctatcaagagcggagcggccgccgcgccggccaaccctgcctcggccgacacgggcggtgcgacgcgaacccaggtcccgcacgaccgcaagccaaaggacccggatgcgaccgacttccacgccgtcgtccagatcaacgattttatccagaaggcgcgctggctcgtcacgaatcgcgattcgtgcgtccttcgggtgccctgttttggtttggctgcccaggcgctgactcctcttgcacgtctctgctcccaggatgaccaagctcatcgacctctccggctgcgccattacgaaccgcggcgtcttttatgcgcctggcgtcgaacctccgcccggcggtgagcccaagctcgcgctcctcgtcgagtcgaacgacgagtggcgagtcgagctcgccgtcaaggagatcacgcgcctcctcgtcgaaggcaccgtcatcggtctcgctcaggagcagcggaacggcaccgccggcggtggcggccgctacagcgtcgtctagagcggcagccacgagcctcgaacaccttcggcgagtatctcgctcgccagcagatatctgttcacacggaatcgcatgcgctttgaccctcctctcttgcctattccctctgcgtcacagagcggcaggcgatgccgaacatcgcggtacgttgacgggttgctctgcttgcttcaccgtctgggaccctttcgcctcgctcttccttcatcttcgcagcagccagagggcccggagatcatgaactaaaggaaggatcagcaacatcgaatgtcttcttggctgccaacagttgagggccggcagcggaagttgcgcaaggccgagcgacttgcgcaggaggcgagggaggcttatgatcggacgggctgacgcgttgaagcgctgactcgctcactcactgaccgacgatgcagaaagagacggggccgggggggaagtgagcgggacgtcgtttgcatgccaattctttgcttacacaacggtctttgcttcgacaacggtcttggcttcgacaacgggctcggcggcggcagcggcggtgacgacgatgggcggtcgatgcggtcgagtgcagaagtccccccccggaaagagcacgccgaagtgcatcctccattcagcagtggctgcagcttgtctctcgagccggcgaggaagccagaagcgacgtgcgaacaacacagcggcgtgcttgaacggccgacgacggcgccctgcggccaaaccttgccctcccgttctagccccaccctccgaccggctctcacgagactgtccagcgcacaaaacactgtttccgacgctggatccgtccctcgcgagcccgtgtacaccagctccgtccgcttgagcccgccggaatgagacggacggtgtgcatcaagagaccggcacgaggctggtgagacgctttcgtccatggggcgtcctacgaggccatatctacatcgagctcattcgcagcagccggatcttgagccccggctgctggccctagaggctcggcgagcaggtcgtcgacgtcgatcaacggttcaccctcgtcgtcgctcggccaatcgggcgacggttcgcgtggtgcgaccggctccgctgccgccggctgcttgcgaccgacgtctgccgccgctgggtaacgctcgtcgtcttcgtcgccgtcactcggccaatccggactcggctcgcgcgccggtgccgccctgcccttgccttcgaccctcttggtcgccgccgccgacggcaaccggtcaatgcccatctcgtcgagcgcccgctgcgtcgcgttgccagccttggtcgtgctcgccggcgggccgccgcggaagggcgtcgtaaaggcctcgcggagccggcggaccttgacatcaccgaggcccgggcaaagcgagagctcctcggctgacgcgttgacgagccggtcaaagctctgcggaaaggcggtgccgcaaggggtcagcttttgtcttcgagcgtttcccaaagtctctcgacggaaggacgaaccccgaacgacgtgctcagcgtcaagacgtccgtcttgttgacgcccttgaccgccgtcagcagccggtggagctggctctcgtagccttgggcgacacgctccttgagaatgtcgggcgacttgtgctcgtagagcttataggtcgcaatatactgcccggcctcttccggcctgagggacggcgagcgggccaaaggccatcagcacagggagtcggcagggaagccggccggggaaggagcgacgcacgtccacgcaacgacgaccgtcaaattgttgatgagacagatctgcaatgagcggcctggcgtcaacatacttcaggggcgagtcggacgttgggcgcaccttggtgatctcgcgtattggctcttgcgggtcggcctgtgaaagacggggagttcagtcgactgcgctgtagagttgcggcaagagtgccagagacgcacgatgtcgcagtggacaagaatgactcggagctcgtacatggctccgagcttctcgatccgaccgtgaaggtactctggatgaaggcggtggtagcgcaagctgatcgaggagtggcagtcgcgatgcgcagcgggtttcaaggacaggagagaggctcggtcagctctgatccctgcgagccccgttactgccagaacgttagaagaagcgaacgcacgacaggtagagcacacagctgtgggcgccgacgacatagtctgggacgatctcgccgtactcccacgggacgccctttataaaggggatgatggggttgccgcgctgccaggagcgggccgggcaaacgtccgagtcagtgccgcaccccctgacagcaccatcgtaagcgccagcacacacctgccgggcagagacgacgatggcattctttgtccgcgatgcctgctggacgaccggcttggcgaccgccgggatcgcaggtgccgcacctggcccgccagcctgcgccgccggccctggcgttgccgacaacgacgagcgcaccggtgcaccgccaccgacggccgcggcgtttctcagactgccaccacccgccgcctgcccagcgatgcgcgacgagctgctgccgctcccgctagcagtggctgatggtgcctgttggccggggaggggccgagcgggcggcggttgccgagcctgcggcgacggcgggcccgctcgcggcggcgatggctggcggcgcggcagttgagcggccgacgtgaaggacggcgagagatctggcgagggcatgctgctgctagatgagcttcaggtcaaagaagatggcggtcaggaaagaaggcgagccagactcatcatcgtcactcgtcgactccgcgccggccggtctctctccctccgacgacgacctgcttgactctttcgccggccgcaacgactcggatcggaaaacgccctcgacgaccagcactagacgccaacgccgaccctcgctcgcatgctccggacgttcctcgatctccagtcttccctccgcggcgcgagcctcatcttctcaaagggcctccgactccagcagcacgacctcgtcgcccgggctgagcggctcgcccaggtcagtctgccgccttctctacccgatcgcatatcgctgacgacgagtgtttgctggcgagcaggctctgccgaggacaggccggccgtcgaacgaggccctgccttcgtcatacgccgcgccgccaacgccgcacgtcgtcgtcgtccgggagtcgagccccccacgaccaccgacgccgtcgcagccgctgcctccagcgacacctgcgatcgtcgaccagcccgacccgtacgctgccccgccggctgctgtaacgtcagcagccgaggccgcaccagcgccgctgaagccagtgccggctccagagcccgcacccgagccggccatcacctatgaggaggccttcgcgcgcttcgccgtcgaggcacgcaagcctctggcgcctcgaccaaagccggtcgaagagctgctggctcgcacgccagaagtcgtcaaggccgcaccggcggctgtggaaccggagccgtctgcccgcgtcgagcacgcctcacctccagctcggcctgcgccagtcgcagagccaccgatggctccctcgaccgaggtcgagactgtacccgagtcgccaaagtcgaccctgagcgcagcgcctgagccttcactcccgctggcgtccgacactctcgcctcgcccctgccagatgtcgatgccgaacgggtcgagccgacgctgcgtgcatcgcgcgtcccctcgtcgcgtctcggccggctcttccactacggcagtaggtccctcagccttcgcgcgttcaatgacggtcgccaagactgatctgatcccttttcggcagcgctcgccacgtcgctcacctggggcgccgcgtccgagacgttccgtcgctcaacctcagccgcgtcggacggcccgcagtcgtcacccttcctctcggagcgcaacctgaatcggctcgttgacaagctcggccagatgcgaggcgccgcgctcaagctcggtcagtttctgagcatacaggagtcgggcacgcttccgcacgagctcgaggaggtcctccggcgcgtccaggccggggccgattacatgccggacgagcagatgcaggagatcctccgcgaggacctcgggcaagagtggcgcgaccgctttgtcgagttcaacccgattccggttgcttcggcctcgatcggccaggtccacaccggtacgatcccctcgccggccagcggtcccgctgggcagacgacgatgccggtggccgttaagatccagttcccgggcgtcgcctcgtcgattgcgtccgacctctcgaacctctcactcctcctgacgtcgtcggccctcctccccaagggcctttatctcggctcgacgatcaaggcgatgcggggcgagctccaggacgagtgcaactatgcgcgcgaggcagagtgcgcccggcgctttggtcgtttgctcggcgtcggcgagcggggcgaggagggtaacctcggcggaccgttccgcgtgccgcggatcgtcggcgagctcagcacgggccgcgtcctgacgatggagcgcatggagggtacgcccctcagcaaggtctttgacctgccgcaggagcagcgcaacaaggtgcaattgaacttggcctcgctcccttgacgactggctgatgtgcaaccccccccctttcccctcagatcggctccaacattttgttgctctgcctccgcgagctgttccagttccgcctgatgcagaccgaccccaactggtccaacttcctctggaacgcgcgcacgtcgcaggtgcggtcgctcaaagagtgtctggcactctttgccctcgtttgctgaacctcttgtgccttgatcgcctcccccgctagatcgagctcatcgactttggcgcgacgcgcgagtactcgaagcgcttcatggatgactggctccggctccttcaggcggcgatcgacgacgacaggccggcgatggtcgagtacagccgcaagctcaagtacctgctcggcggcgagtcgcaggagatggtcgacgcccacgtgacgtccatgtcgcttctcggaggtgcgtctatgagtcatgtgagagggcgcccttcccggcgggtcctgacctaagctcccgcctgccttgcagtcccgttccgcgcgtcggccagcggtcagccgtacgactttgcgaagcagacgttcatcggcgaggtgcgcagccccgcttaactcaagcctcggcccctcctctgacccttccttgctcgcacaggtccgcgcccagatccccgttatgctccgtgagcgcctgacgccgccgcccgtcgagacctactcgcttaaccgcaagctgtcgggctcgttccttctctgcgcccggctcggcagccgggtcgacgcgatggccgtctggcgcgaggcgacgcggggctacgtctttgggccagaggagggtgagctggtagaggaggtcgccagcgatcgataaggcttcgacctgcgttaatggccgttcagaccgccaggtctcgacaagggcgcgcagccagagatgcgcgcggacggtggtttcaatggctcagtacatgcatcggcttctcggtcgcttctggcgtcccgagtggggtcgtcccgtcgccgccagcgcccgcaaagctcggcgctggactcggagttcgcgagctccgtgagctccctcgaccgtcggcaatttcgcccgggaccggtggcttctttcgtcggtagccgagcatccgccaccagaggcccttgagcccggtctgcgacgcccggagctggtggtatcgttcggcccggcgtcgctcaaagagcgcccggtagcgctcgtagccgtcgcggaaggcccgttcgacccgggacgagaagatgagctcgccccgggggttcttggttggcgggatcgaagggagggggatcggcgcgccagtcgtcgcgctaatccgggtcgacggccggaccggtgccgaagttgtcgtcgacgagaagaggagggagaaggggaagggaatgaaccgcatgtaaggcgccgaggccgtccgcatgttgaggtgcatgttcatcgaccgcagcgcccggttggcgtgcggcacgtacctgggagcgcacggggtcgtcagctcagcagcttccggagcgcaggggtctacacggcgacgcaccggttggcgtaaccgatccgctcagagtacatgcccgaggcaaagaaaaggaggagcgtgacgacggcgaccgggagcaaggcaaggtggaggtagtgcagcgatgtcgtctgatcgaacgacggagagggggtgggttgatcagccagcgtaagcttccgagcacccgtcgggcaagatcccgccgacgcacgggtgagggccggagaaaggcctcgtgagcgagaacgacgatgatggccgagaggatgacgaggaagactgggtgagccggccgatccaaaggatgacacgaggtcggcaaccccagcgcgtcgaggcgggcagggcggaggtgaggcgaggtgatggtagcgtcagaatgctcgtcagcctcgcatgcctgggcaaccgtcctcgtacgccgagcatgagcgacgcaccctcgtacttgcgcttcctgcttcggagcagggccgcattctgcttgaggcgctcctcaaagagcaagaggtccttgaacgaggcctgctgggcggccggcgcgaagccttgcttgccggcgccaccaccgacggccgaaggcgaacgccggacgagaggcatcggcctgacctggacgcaagaacggtcccctgctacgatctgaagaggccgagaagcgaagagtgggcggagctatcgaggcaagatggtggtccggcggcagccgacgagtcgcgtcgcttcgtgtccccaacccgcttgtccgctccccctcgacagccatactggccctcgccggactcgccatacttcaagcagtctcctgatggcagacccagcaagaccgtctgctggaggccggcaccggtcatcagtctcgttccagcctcgcctgtcggtgacccggtcgagctcgctagcctcggttcaggcgagctcgccctcgttgctggcggcgacctcgttcgcgacgccagcaggccatcagcctcttccgttgcggaccggcgactttggcaaccctccggccgacctggactcgccgccatcgacgggcgagacgacgagcagcttccagacgtcgtcgtcatcggacgagtcgtcgccttacaactcggcctcggaggacccggtcgtcgcgccgggcccgagcggtcggcgcgagctcgagctcgaccggtcagaggaggcccagcgctttgagctcgggagcgacgccgaggacgaggcctggagcgatgccggtggccacggccaggatgacgagacctcggccgcctcgcccttcatcccggcccacagctggaccggccggcgtcggcgacactcgcgctcacgacgctcgacgacgccttcgtccggcaacctgacgctcttccaactcacggtgaacatgctggccttgacgttctcgccgacaatgctcgccctgccgtacgcgacctacctgctctcgccgccgctcttcatccctctactgtgtgcgatcgccggcctcgcggcagccaaccacctcggcctcgtgtacgtcgcgcggtacctcggcgtcaagcggttcgaagacctcggccgtggctttggcggcgggcgcagaacacgcgttgcgatgcgggtcctgatcgtgctcgccggcatgagcgtcctcgtcctctacctgcgcagtcagtgtgcactgtgcgccggccggtctgatgtcggaaccgtcactgactggccttcctcttttgatcctccgcagtgatcaccgacctcgtcctccccatcggcctcgcgccgaatgcgcaaccggccatctggcgctcgcacttgctctgcacgctcgtcgttggcctgctcgtgagtactggcgggcgggcgggctatctcgcacatgcccaggctgacctttcatcgctcacacgtgggcgaccaccaacagatcgtgccgctgctctacccttcgcacctccactcaaaaaccatcacccgtctgacacttctgtcggccgtcttgccggtcgtcgtctttatcgtcgctctcgttaagacagtcgccctcgcgagaggcgactttgagggctcgcatgccgcgatgtgggagagaccgcgcttcggctatgtcgttggtgggagcggtcagggccgaggaaccgtctggggcggcatgtgtacgtctgctgctgactgtggcccgtcttggctcggagctgacccgccattcgaaggtccgcagccgtcatcaccttcatcttctcggcgcacgtctacacgctgcccaactactcgaccttgctcaagccatcgcagcggtcgtttgcgctctcgcccgtcctccagtcgggcatcatactcgcgctcgccctgccgctgtcgctcgtcccctactttctcctcccgccgacgtcgcccccgccgccgatgctgctcgacgcctttccaaacaccgacagctgggtgtgcactgcccggctctgcgcggccggcatggccgtctctggcgtgccgatggtcttcatcccgacgcgcaacgtcgtcgcccggctcgtcaagccatgggggatcgagggcggcgggctcgagggcgtcggccggcgcggacgcgagttcttttccgtcacggccggctgctgggccatctgcgtcggcttcgcgctcgttggcggccggacgggcgaattcatccctctgctcggcgtctttggggcatttgcgctcggctttctcctgccaggtgcgtccaggccacaccaaggcgtcagcttaacggcaccgactgactggtcttctcgctcttcaagccctcctcttcatcgtcctcttccacctgcgccggccgctatcgatcatctttccccagggcgcctcgcaacctccagcgacaccgatccccggctcgaccgacgtcgccaacgccgccttcccgacgcccttgccccaaacagtcccccagctgtcggtcgacacgcttctcgctcgcaaggagcgccagcttcagcgccggcagtcgaccaagcgcatctggcaggacctcgtcttcttctttgccggcgtcccgctcagcgtgctcgtcaccggctggacggccggccggatggtcggcgtctggtagtctctcattctctctcggatcttttccttctctccacggggcgactcgagggcgcgctccccgttgtctgtgctatcatccatcaatgtcttgtctctgcattgacttatcatagggagagtgccgaccagcgagcgagcagcgagggcaacgcgcgtcacgctgccggccgcctgcgttttcctttggcgcgccggctcagcagcgccgccgcccacccgagtcctgctgctccctgccgacgcccaccttctcctccatccttgccctctctccgcctgttgcagcagccctcgcagttcgccgctcgatcttctccgcttgtgcctcaggaagctccagcaaagtctcgcttcgcagcgccgccgccttcgcccggtcgtcatctccgaagaagctctctacctctcctccttcgcccctccggctcagccccagctgcccaccatggccatggacggagacctcatctcgctcgtcaacaagctccagtgcggccgtcgtctttgcgtcaacctaggtcgaagcgtttgctgacagtatcgtcgctccttcagggacacgttcaatgccatcggtggagaccctctcgacctgtgcgtcctctgctgtttgctcgccgacctgcccgtgatccaccagaagctgaccacatcgcaccttgtcctgtctcctgctgctcagtccgcagatcgtcgtcgtacgtccacccgaagcttgcgccgacggccggtcgcagctgacgagactgactttcgatctcgcttcgctctctcgcgcaccgccgctcgccaggtcggctcgcaatcgtccggcaagtcgtcggtgctcgagacgtgcgcccagagtgcccttcgtaacagaaagggtcccgctgctgaccttcctctccttgcgccctacagcatcgtcggccgagacttcctgccgcgaggccaggtgcgtcgagccggctgaaggtgctcgcgcgcgtcggtgctggcagttgacagccagcctctcctcctcctcctccagggcatcgtcacccggcgaccgctcgttctgcagctgattcacacagccagttcttcggcgcactgtgcgtagctcattcgcctccagcttgcgagctggacgcagagctgaccgacaatctgccctgccggactcgcagcgctgaacggcacgctcaacgacaccgggaccgagtacgccgagtttctccacgtcaacaagaagtttaccgactttgaggagatccgcaaggagattgagagcgagacgttccgcgtcgccgggcagaacaaggtgcgcgcgggatgcctttgatcggccgatggcatcaaaggggaggcgagctaacatgcaggcactgctttctctagggcgtctccaaactgccgatcaacctcaagatctatggcccgggtgtgcttgatctgacgctcgtcgacctgcctggtctgacaaaaatccccgttggcgaccagccaggagacatcgagcgtcagatccggaatctcgttaccgactacatttcgaagcccaactcggtcatcctcgccgtctcgccggccaacgtcgacctggccaactctgacgcgctcaagctcgcccgatcggttgacccacgtggcctccggacgattggcgtcctgaccaagctcgacctgatggaccagggcacgaacgcggccgacatcttgactggccgcgtctacccgctcaagctcggcttcatcggcgtcgtcaaccggtcccagcaggacatcaacgtcggcctgccgatgaaggatgcggccgagaaggaggaggagttctttgcgcgccacccggcataccggacgtttgcgcacaagtgcgggacgcgcttcatggccaagcagctcaaccacgtcctgatgaaccacatccgcgagaagctgcccgacatgaaggccaggctcaacacgcttatgggccagacacagcacgagctcaactcgtttggcgactcgaccttcctcggcgagcagcaccggggctcgctcatcctcaagctgatgaccgagtttgcgcgcgattttatctcggcgatcgacggcacctcgctcgatatttcgaccaaggagctctgcggtggtgcccgcatctactacatcttccacgacgtcttcggccgcgcgctcgagagcatcgacccggccaacaacctctcgacacaggacatccggacggcgattcgcaactcgaccggaccgaggccgagcctgtttgtgcccgaggttgcgtttgacctgctcgtcaagccgcagatcaagctgctcgagggcccgagcttgcgctgcgtcgagctcgtctacgaggagctcatgaagatctgccacaaccgaacgagcacggtcggtccctgtccctcccccgccgctcaacttatccatcgaaactgatgcttccctctttcgcaggagctccaacggttccctaagctgcactcgcagctagtcgaggtcgtctctgagctcctgcgcgagcggctcggcccgacgtccgactacacgacttcgctgatttcgattcaggccgcctatatcaacacgaaccacccggcgtttgtcgctggctcggccaacattgcgcgcgagggcgcccagcagcacaagccggcgccgtcgcacgtcccttcgatcgcgagcgagggcgacgacgacgaggcctcggtcgagcacaatgtcgaggacatgctgctcaacggcggcgggcagcgcgagagccggtccgtctccgagacgatgcacgacaggagcgggcgcaagcaccgggcaaatgcgaatgcgctcgacggaccgtcgtcctcgggcaaggcccatcatggccacgaccggtcgtcccggcgcggccaggacaaggcaccggcgctccaggtccagcagcagcaccagcagcaccagcagcagaatcagaatgcggcggcgggtgctggcgccaaggagtcgttcctcaactattttttcggcggccagcctggcgccgacggccactcgtcggttctcgcctcgagctttgacaaccggggctcgaacgccgtcacgcaccgcgggttcggcggcggcgcgtccgacatcctgcccgagctctcggcccgcaacggcggccacggcagcggcgtcgtcggccggttcgatcaccaggcccagtcgacgtttgacatgaagtcgctcggcaagcacctcgagccctcgccggcggacccggagcacccgcagctgtcgatgcgcgaggagatggagacgaacctgatccggtcgctcatctgctcctacttctcaatcgtccggcaaacgatccaggaccttgtgcccaaggccgtcatgcatgtgcgtccgcccctcgtcctagtcgcccccattgtgtccttccaagctgacctctgaacctttcctcccaatcagctgctcgtcaacttctcgcgcgaaaacatccagtcgcggctcgtcacgagcctgtacaagcccgatctgtttgccgacctgctcgccgaggacgacgcgctcgtcgccgagcggacgcgcgtcaaggccctgctcgatgcgtacaaggaggccttcaagtgagtcgtcgaccagaaatagaagcatccctccggcgctctgcgggatttcgctgacccacccccttcgtctcttccttcccagggtcctctcggaagtcacggtgaagtcgacatagagcacacccttcccttcttttctggccgccctccctgcctgcttgtaccaacggacgatccttcccaccctccctcgccttgggggagcgctcgacgggtgacctcggacccacgcaccttccctcctcgcttcatgtaccaatcgccgcacaattttcctttccctccactcactcccaaagaaatacacatgcaaagatccgctctgtctggctctggcgacgttcctgtccgagggaggctgtggactcgccgcagtgactgaccggccggctcgcgctgcggccgaggttgacgatgccgtaggccacgcagcttcccttcgcaccaccaccttcactctcgcctctcgacagacatccacaacccaaccttttcgaagcgcaacctactcactagactctgatgtcggccaaggacgtgagtgtctggttgcggccgtcgagatgctgtcagagcgttcgccgtaggctgatcgcctcctctccctccgaccgccgttgctgcggtcgctgctcgccgcctcgccattccagtactgtacgtgccgccttgcccagatcgttgttccagatcaacacgccatgtactgatgctgagcttgcgtgcggatggcctgccagacggaaaccaggggcagcagcagcagggtggctacgtgcgtccgtcgacctgcctccctgaccgggggcgaccgagccacctccgatcgttgagctgacgcttcatccatcactccctggcagcctcagcagggctacccgcagcagggcggctaccagcagggcggctacggcggtgcgccccagcagggtggctactaccctccccagcagggaggctacggcgcccctcctcagcagtacggcggccagcagcagcgtgcgccccccggcgctcttcgcctcgaggtctctgtctccatgcgctggggctgaccactctctccgcctcctgctgcgtgctcgccgcctatcagagtagtacgtggcagtcccggactttcagtgtcctgtcgccagactgcgcgctgacgtcttccttcctccgatcaccctgcctcgtcgcagctaccagccgcagggccaacctcagcaggtctacgtccagcagcccaagaagtgcggcctgcttccctgattgtgctctagcctgctcgctgggcgactgacttacgccccctccgccctcgccctttgctcaggtcaagcggcgccgccggtggaggctgcatggcctgcctcgccggatgcctctggtccgtccccggctgcactttccgcggcgactgcaggcaggtgccgaagctgaaacgtgactcccttcttgcagctgttgctgcgcagaggagctctgctgcgacatgctcttctaatcgactctggattgagcaaagggacgactgccgagcgctgccctgccggttccattctcggctcaaatcctcccctgcctcgctcctgcgacccggcctaatctctccggcgtccactttcggccctcctgtcagtgtggctccagccgtcctcgcgctcaaagggggatagtctgcgccgacttgtgcgctcctcgctccgacttttcgccctctccgacccgtacctgtacttccgtgatgcaaatgctgcctgcctgaattcgtctcgaaggctgccgcccgggtcgaggctagtcacgtcgggtccggggtcctctgcgtgcggggccgtggtccttctgcgaccttcctgcctgtctccttcgtaggccgtcaaagagcggcagcgatgtcgtcatctcccagctctcaacgaccacccccaacaggcccagcgcccttcacgcaacaacagcatgccgaccgcatttcacaagggaccaggctacggaggcgagacctgggtgcgcctggagtcttgcgcgcagcacctcctctgtcgctgacccgtcgctcgtccctctactccccctcgaacagaggttcaagcgtcgcgtacgcatctccaagcgttcaggtccgctgtcctcttcccttgcttttcatgctcgacgaccgaccgctcacgcaatcgcagacgatccgcgcccccctcgcagccttcgtcgccgccttcgggctcggcttctacctatactcgacgagcaggacgctcgcggacgagcgccagttcgcaagtggggatggagggcaagcaggcgagccggtcgctggttcgtcgagggaggcgcgaaaacggactttcgctggccgcttatggtgaccgggcccggcccgccgaccctcttttcgccccttacgctcctcgtcaatgtcaggtggtcgatcgtcatgcgaaaccccagcccatcgtcccatgcacgcctgcgctcatgcgtcgcccgagaccatcgcctgctggctcgcagccgtcgccgccagcctcgaacgcttcttctcggcctcggcctccttctcggcctcaatctccttgacgacctcctcaatctctggcagcgtcaagttctgcgcggcaggcaggcagagaagattgcaagtcagcggatgagccggaatctggcgggcaggaagggaagcagcgcaccttcagcttgccaaagccgtccatgacggtaatctcaacgtttttggcgcccgtctggacaacctcgagcagcgacttgaccgttagcttgatcgtctcgtcgcgcgtcatgtcgtcccggtggttcttctcgaggaactcgcggatcgtcttggacgatcggccgacggcgtttgcctaaagacggatcgatcggcagggtcagctggtgcactgaagggcgcaggatcgtgcacatgcgacgcaccttccaggcggagtagatgcccgagggttctgtcaggtaaagccgcgggacattgtcgttcgggtcgaatccgatgagcaggcacgagatgccgaatggccggacgccaccggattgcgtgtagcgctgggggaagacatgaatgctgacggcgtcagctgcggctgtccttgaatggaagatgatcaagaggcgctcgcacctgcttgtaggcggcaatgtagcgcgtgatgtactctacgctgactgggtcctcgacggtcagccgatggctctggcactcgacccgcgccttgtcgatgatgatccggccgtcggcggtcagacctacgcagaaagagtgaaagagtgagagaggcgacgcaagagaagtcagcaccgtcgatgtcgtcgttgacgacacgcggcgcggctcggctcgaacgacgacgagctgctgccgctgccgacctctaagccgcgcgctccgcaagacgccgcaaggcacacgtaccggcaaaagcgaggcagacgtgatcgtcaatcattgcaaccttccggaccgtccgcgggtcctgaagctggagcgccgtcttcttctcgacgccgaggacgacgcacgacgacgacttgacgccgacggcagcggtacccttagcgacggcctcgagcgcatagtcgacctggcaggaagggccaagagtgtcagcggaatagagcgctggtgcagggccgcaagctgagagggtggccggcaccgacctggaacagctggagggtcgagtcgagcagaggaggatgctcaaacggccgtcagcggtgtccaagtgagagcagctcagggtcaagcgagtgctcacgtgaccgtccggcgagaagacggtgagagctggagtcgcagataaggaccaacgggtcagcgagctgtcagcaggctgagggggggcggacagcgacgaggggcgatctcgcgcagctccctccgaccgagggagctgcgagccgacgcccgagtgggctgaggcagacccgggtgcctggcgcccgtttcccttgaagaacgcagagactaacctcggtcgtacgagcgtgacatctggagaggctaggagcggttctgagatagggggagaagggttgctggtggcagccggtgcgagaggcgatggcggcgagacgacgtgtcccggagggacctcccgtagtgcatcaagcaaatgcacgaccgacagggcgcctcgcgcgcgaccctcgttcgctgcgcctccatcagctgctccggctcgcctccaatctcagcctcgtccgcgccctcgcctcccttcgttgttcaacagaacagaagctcgagccgccttcgcctctcgatacgcctctctccttcaggctttgcccgccagctcgatggcagcggcggacgcgctgccgccagccgacggtcatgcgcaggccgccgacctgacgctcgcgaccttccaggtacggctcgccgaacgtccgtgaccgccgccaggtcgaccggaactgacctgcgtccctttcgacgcggccaggactcattctccgcttcggacctgctcaactcgctctcggagcggctgattgcaagctcggcagccgccccgctgggcgcggctttcgacccgctcccgttcctccgaacgttcacgtcgtcgcttgacagcctgctcgtgatccgctcgcaggcccagacgcgaaccgaacggctcgagagcgaggtccacaaggccgagaaggagtacggccgccggctcggcgagctcgatcgcggctttgacgccgtccatgcgagctttgccgacctgagcacgagcatcaccgacctaacgagcccgacgctccggatcggcgacctgctgtcgacactccattcgagccggtcgaaagcccagtcgacgacagtcctgctgtcgtactaccttgcgctcgcggcgagcgaccggacgccgctcgacaagctgctggccgacgcgcgaagggacggtcgcgaggggcgcgagggccggatgcgcgcggccgtcactggtcgcaggctattgagcctcgtcaaggccgacgacggtcattccggtggggacgcagtagggaccggtaacggcgatgacgaggacgacgatgacggggcaagcagcgacgacagcggcaagcgcgagatggccaaggtccgggccgaggttgagatctttggcgagcgattcgagaaggacgtgctgggcctatttgaccgctactaccggtccgtctcgcgagcgacccacttcctgcaactgcctgagcttgctgacacgagcgacgcactttgcagccgcggcgaccccaagatgatgggcgtgcgtgcccagcccttccgatgcccctcgccactcactgggctgactttgaacccttcccgctgcagcactgcgcacgcgttctgctcgagttcaacggtggagcttcttgcgtccaggtctacgtcaaccagcacgacttcttcatctcgcgcgatcggatcggcggcggccaggcgccgccgggggccgcagccgccgacgccgacttttggcggacgctcccggacccgctccggcctgcaccacgctttgagccgacgctcaaagcgctctttgacgacatccgggcaaccgtcaaggacgaggctcagatcatccaggccgtcttcccccagccgggcgtcgtcatgcgcgtcttcctccagcgcgtcttcgcccaggtcgtccagcagcatctcgaggcgctcctcgaccgggcgagcgcaacctcgacgctcgcctcgctcaggctcctgcacattgcgcatcgcctgacgacgacgctcgccgacgacttgaaggcgttcgactttgcgccggccatcactggagcgggctgcatcgccgctggcgcggtcggaagcgatgcgacgatcggacagacgcttgacatttgcgtcgacgagacgtttgcgccgtacctcgagggcaagcggtacctcgaccgggagcgcaagagtctcggcgagctctacggcggcttcctgctccgcttcacccggtatcacgtgcgttgtcctgcttgtctttccgacttagcggctgacaggagaccatcggcgcacccctaccccaccacaggagatgacacacaaggccaagccaaacggcctctttgaccgcgtcgtgaatcagctagcgaccgcctcgacctcatcctcgtcatcgcagacgacccaggcagctgcagcggcgatccttaagtactctggcgtcgagaagcgggcgggcgagaaggacggcgagctcaaagtccagcagacggacggagagacgacggtcgagctgggcgatacgatcctccgctggcatgccgaggcgctcggccgatgcgtcgagctcagcgcgacgtcagacgtgtgaggctcccctgcctgcacgagagttaatttactctgccaaacaactgacgaactgtcgccttttctaggccgcgcaacgcgctcgacctggccaaggtcctgaccgaagccctcggtcggtcgtacatcgagacctccctcgactcgtgagcatcgctttttcctcgcgcgcgaaggctctgttggctgaaatcgagctctgccgggccactcctagggcgctctcgaaactcgaggcgaatgatcctaggttcgagcccgacctctcggccctggcgaccgtcaagacgtcggaccttctctgcgcgctctcgcagcgatatgtcacgacggctctcacaccactcgtctcgtcggctgttggcgtccggcgggatctggcggtgctgaaccaggccaatgtttcgcggatcgagaccaaggtcaacgcgatcctgcatcgcctgctcgatggtaagtccagcctgctgctcagtctcacttagtcgaggctgacctcgccggcctcattctcgcagccttgctcgcttggctgtcaatcctcctctcgcgccagcgcaaagacgacttcaagccgcgcaacgatgacgcctcgttcgagcgggtcaacacggtcccctgcgcggcgacggttgacgtcgtcgaacgggtccgaacggccgtcgtgacccacctgacgggcaagaatgccgaggccttcctgattgagctcggcgtcggcttccatgcgtccgtcctccaatttgccggtcgctcgtgacacctgacacggtgctgactccccgccgcctgcagcctcctgctcgaccacttgcgcaagttcccggtcagcgtcaccggcgcgcttatgctcaccaagtgcgtcgttagagcgcggacgcccccggcgaagttgccccgcctgaaccctccctccgttcttctcctctcctgacagggacctcgcctcttaccaagagtgcttcgccagctttggcatcccgctcgtcaacgatcggttcgcgatgctccgccagctcggcaatctctttgtcgtccagcccgaagtcctcaagtcgttcatggccgaatcgtacctcggccaggttgagccggcgctgctacggccgtacctcgcgcaacgggtggactacccgtcgtttgcaaggcggttcgccgaggacgagggcttcggcatcgatcgcgacgcgccggtcccttcgagggcccagctcggggcggtcgaccggctgagtgctctcggcggtcaggcgctcgccgtcggcaaggggaggctgacggggatgatggacgagctcggcgcgttctccgcgacgctcgctggaggcggagggagtgatgcaacggcggcacgcccaccgccgacggcagcgctggtagaccggatcgcagccaaccgcgaggcgagggcggtcgccgccaacgcgtctggccggtctacgccctcaggcagcagtacagtaggccgggccggtccgccctcgacggccgcctactttacgccgatgccgatgtagcagacggctcgccctttccgtccttccgttgttgccctcctctcgatctccccctcacgatctctctatcctccttcgacgataatgacccccttgcaagcgaacttgactgagatgagaaggcattagatcgtgaaagagagggtccagaggacgacaaggagatggcaagacatgaggcggaggggaggcgggatactcctcagggctcaactcaactacgcacggagagggacgtccggccgactcgcggcttgccaggactacttatcgtgctagccccgagccggctccgtcgccgctcgccgccggcagccccacccatgccaccgagcacggccttccggggtgtgccgatgttctccttcccgagtcccgacaagtacggccgtgcgctcaccgacggcttggtcggcgcgccctcctctgcttgcgtgctcgacgtcgaggcggcctttgccaaggcagaacgggctagaggagacgatcggcggccgtagtttcgcctcgcgggcgtcaagtgggccgagcggggtgacgagggcttggcgtgagcgaccgctgcagcctcagaagacgacgacgtggaaaaagacgaggcggcggccgtcgcgtgttctggcgtcggcgggaggtcggcgatgagggccgccatctgcagcgagcgcttctcctcgaggaaacggagccgctccgcctggcagcgcagggaaagtgcagaggatgtcagtgtgactcctcagctgagctcgaaaccagccctcgcagccggacgcacctccagctcgatccggtccttgccgagtttgacggcggcctctgtgtacctcctgcgctcctcctcaagcgcctcccgctgcttggcgagcgcagcttggctagtcgcgtcgctcgtagcgtcgccgtcgacaacctcggcccggacgctttcaagcgtcgccgactggcgcataaagtcctccaagaaggcctgacgctcctcaagctgcacttggagccgacctgttgagacgagcaagccccgcggtcagtcgaaccgacagacacaggacgctctcgggtagaacgcaccgagttcctcctcgaggcttcggatcgtctcctgcgcagctgccgcccgagctctactcaactcgtcgtcctcgctcagagcagcatccgaaggagttgccgccagctctattgaccggacggcccgtacccgcacctggagttgcgaaagtaggccgaggatggtagcacgcgcagccgacgcgtgcgaggtcgtgctcggctgcagcgctgcctctgcccgctgctcagccggcgtcgacgtcgagccaaacaagccggccgtcgtcggatcaaagagcgagctcggcgtgatcgtctcgggataagcgccggcctcgttctcggccgaagccgacccaagcgcgacacacgcctgctgaaggtgctggccgagctggaggaggacgcgccggaatgcatcgttctcctcgacgatgcgtgcgcgcgagtcctcgagctcgtccatcgctgcctggtggaaccgactcggctggggagggagaaagggtggcgaagtggtcagctcaaattcgtggccttgcggcgcactcgacgggatgcacggcgccgagtcagccggcgatgtacctcgggtaacggctgcagcagcgcaagcccgcgcgagtcgacataattgacgagcgtcaaccccgaccggctcgactgctgcttggcaagctcggagctcgccttctgccagcggtcgagcacgcggttcgtctcgctctctttccgcttgaggtcgtgcgcggcctgcgttcggacaaaggcgagcgccgtccgagccttagcgacctcgtcgcgtgtcttgcggtgggactcttgctcgagcttgagtgcagtctgggccgccctggtaatcggcaaggaggttggatcagcgagctggtctgagtggcggcggctgcctgactccacgcgagcatgcgatcgggagggcttgggacgaacgtgagctggctccgagcagcgtgctccttgcgctcggccacagcggcgtcgtccctgctcgacctgaacatctttgtcaggcgttcgtggtcgtaagcgagcgtccggtgcgccgtgctgacggcctcgaggctcgcgaggtcgtcctgcgcgaggcaagccgaagcagacgcagcatcggagagttgacgatcacggccgaggtaacgaaggaaggggcgtagaaggtgtcagcacgacctcctgctgcgctggatgacggatggtttggtctgccagagacgcaccgcccgctgctggaggagtgcaaacaggcactttgcgagctgctcgcgctcggccgagccgaggccgccgaccgagagcggccggcgagtgaagccgttcgattgaagctgcgcgttgaggtagtccattgaggaggaggatgagccggatgaggatgggctgggcaaggcggagggtcgggacgatgacgggcgggtcagctgtcggctcgaaccgccatccaagccgcgcgagcacgaggcgcagacttaccgaggtgggatgggcagatcatctgctacggaaggctgagagggcatcgtgcgtgcacctcgtgtcgctcagggcctcggatgatcgttggtgttggccgtcgctcttgttgggcgacaacgtcgctgctccggatagtcagtcgcgtggaattgactacgagaggaccgatgcagttcgagagggcatacacctcgccctccatcttcccctccccctactcacgaccttcgaccgaacttccaactccttcagctcgcccgaaccatgtcccgccagccaggttacacaattgtcgacgcagatgacgaggtgcgtctgccgttgaagctcctctccccgtagagctgacgccgagcgagctccctttccctcccgaacctgctctctacgcgcgtctcagggcgccgagatgggctacgcgccgtcatcagctccgcccgcagctgatccgctcgcgttcaagtcgttcgacgccggcgaggccggtgcgcttggaggcggcatcggccagcagcagcagcaggggtctggcaccggtcgggcagtgggcgcccacggctcgggctccggaggaggtgcgtgcgaccctcgtacggctccggcgcttgaccgagtagcctcgaggctgatccggcctatgtcctcctcctgcttaggctactcgaccttcttcaacatcgagtactaccagtacctgtttgacattgacgcgaccgaggtcgtccagcgctggtacgtctgtctgcccgctgcgcaggaggcacgctcggccatccgcttggatctaagtgctgaccgatccgctcgcttgacgcttcgtagtacgaaggcgcttattcccgtgccgtccaaaccaactggctcgttcgttcaggacgtctgcgacggccggcctgacctgtacggtaagtcgccctcccgctcggcgcttcgtgcccttccagctgcgacctggttttgcgagctgtgaacccatgctgacggatcatcaccgcttctcacgctctattgccgttgcgactgccgtaccgccgttcgattccctgcgctcgcccgccgcaatgcaggtcccttttggtccttgacgacgctcgccttcaccctctacgtctgctcgtccctctcgtcctcggtcctcgcatacatggccgacccggacgcgccaaccgtccaggacgtcggccgcatctcgcttgcgaccgcgctcgtctacacgtacggcctcggctggccggccgtcctctggggcgtcgtccgctggttcggaggggccgaggtcgagtggtcgctcgtcgaggcctggaccgtctacggctgtcagttgctctcctctacctgaaccaacccttccgggtttgagtccgtgtctgaccatctggctgaccctctgcgaccgtctttccagacgccatgttcacctatatcccgatcacgctcctctgcatgatcccgatcccgatcctccgctggatccttgtcggcctcggcgccgtctcgtccggctacttcctgtcagtctccttcacgcctgcagctatgcgcacggccgattcgctgacaaggtgtcctctctcgaccccgctcgccagcttctgcaacgtctaccccgtgctcgcgacgctcgactcaaagctgcctcggctgctgatcgtcgccatcatgctcgcccacgcggcgatcgcgctgacgttcaaggtcgtcttcttctcgtgagtcctgctgctaacgttcttcgaccgaatctgaccgctgatgcgcttcgtcgtcatcgtcagctatggcaagccgatcggacccgccgacccgctcacgaacccgcttgggggcgcagcggacgccgtcgtcagcgccgccgctcgagctttcctttgagagcggcctacgctcgcgcctttcgtctgcaagaggacgagagaagaagcgacgaccatgtgttgcgggatgcacatgacttcccaagctctgctcctgtgctcgttcccagaaagatgacctggctggcaggagtgacgacggcgtctccaaccgtttctccgctcgcgtccttttgcttgacttgcgactggctgcacgagcgcgactaggaaaggcgcctctaggcaggcagatcgcatccggtcgcgcggcgaagcgaccagggccttcgactagcgcgacacgcgaggcagacgaggcgaagacctcgctgcgcgatgttgctagccctcctccgcgttggcaattccctttcacctccacttgcctcgccgtcggatccgaaacggcctgccttacgaagatcagcacgttgccctcagcccgatggagctttgctaagaaccatcttcttcctgcatcaaccatataggccggtatgccctgccgacagtcaggctggcctcgaatcagaggcgtcgtggcacttgcccgccagcgcgctcggcgcacctttaaccactgatcttgctcttcccatcagagatcgcctggtcgctcacgacgcggaaacatcgggctcgtcttgctgcatccgaccaaacctttccgaccgactgagctgccatgtgtgagacaggatcagtgaatctacggccgcaccagcccacccaagtggccagtttcaaactccgcctcgcagcgcgacgcgtcgcgcagcgcgccactcgacgcgttcgcgcctttcgcccgctccttcctcaccctcaccacctctctgcgctacccctacccctcttgcctatccttccacaccaccaccacccactccacaccgctttcaccccctccaacatgcccagcagcaccactcgcaacatccgccccgccggcactcggccggcgccacgcgcggcgtcaagtcccagattaaggctcagactgtcaagaaggtgacgatgaagatggacgcggctccgccgatccagcagtccgaggagatggctgacgagatgaaggtcgcgaaggagtcggcggtcgaggcggtcgtagaggagacggctgccgaggccgccaaagcgttgctggctctgtctgtccttgctcctgcggccgtcgctgaccccgtttccgctcccacctttacctcaaagcccgcgcccgccttcgagcacaccgtcgtcatggttgacgtcgaggttgtggcgcgtggcctgctcggcctccaagcggcccgcaccaagctcaacctcgaggtaggccactccttttcgccgccggccgacgcgccggcggccgtcgctgttgttcggcgccctccttctcctgctactgcggccgacctcgaggacaagaccatccagtcaggcctgcttttcaactgggtccgccgcttctacttcatcgacacgtgagtctctcctctccctctctctccctcgctcgccaaccgagtctgacccatctctctcctccttgcctgcagcgactctggcctgacgacctaggaggagccgactgacgcccgaaggctgcgagacgggcaggcgcgagacgcctctccgggtcaagttcctgaagtacctcgctaaccgcacgctgacagacccgctccaggcggcggctctcgatgcgatgaaggcgcgctccacgtcgatggccagcgttgtgagtccctcctctctgctctccttccgaacgccctctgccgacttgctgttctcccgctctcaggactaccgctgctctgctcttcgtccccgtctcgcctgacttctactcacgcctggcgttcctccttacgagggaccagcagcaagcggctcggtcgcaccagaagcgggtcaaccggatcaaggcgatcgtctgtggtgcttaccctcccggccgcctctgctggccgccggactcgtcgcagcctcccgccgcacctcgtagccgccgtcggcggtcgctgacccttgacaagaactcactctcactgacatctgcgagaggtaagctgactcgcactcgcaacggtaggccgctttccctctccgtctcagtctctgcatcggtaaatcagtctcgggtcgcgctccgttcgcgtcggtacgtcccccgccgccctctcgcttcagtctcgcccagtcgctgacctgtcgacggcctccgcccactcttgttcgccgtcttgctctctcgctcggtggatcacccagcgacctccgccgccgctgaccaggttggtctttccccgccttctcgacttgtctctcgctcagtctctctcgccttgtcctttgctctctcgtctccctcgtccttgctttgtctcgctcagtctgcttctctcgggctctcgtgctctcttgctcgctttgttgttctcgctctgtctccatggccttgctctctactttcgtttcctgtctctcgaagggttgcaagctgatcgacctggtctccttccttcgtaaaagctcgcttgcgcctttgcggcagcgcgttcgagagcatgagcgagcggaaggaggggctagtcatgttacaagtgacggcagggttgacgggctagagctacaggatgacgggggatgatggaaagcgccctctcagatggtctggccgtctcgccacttgttgcggcacattcggaaagtcaagtagcatgcgacgagggccgacacgccgccaaatctgcgcgagcgaattgagagcggaaggtcagcacatgtgagccatcagagaggctgagaaaagccgcaccggaagatgaagccgacggctgtcgtgttagcgccctcgccggcggtcccgccttcttgccgtatcagcatgtgagcgaagaggtcggtcgtcgccgcgaccgccgtgccatttgacgggctggcgagcgggattgttgagttatgtacgaccgcgggcggcacgggtgcgtggatgacggttcgtgccgggtcgagcgcgtaaaagatgatgctcgagaggctgctcaagagagatgaaagcagtcagcgagctgttgcgcgcgtggtacagatgaagggatgctggccgcacaaagtgatgatgaattgcgggatctagtgcaagcaaaagaaggagcaagttagcgagcctgatcccgcgcctgctaccaggcgagcgaaaacgtacgacgatgaacacattgtggatgccctgcgcgcggaaaacctgcattagtctcggccctggtcagatcacaggcggagcaactcacgaggatgacgccggccttctctgcggttccgccgctcttgcgtgggccctccaactcggcagcaaaggcgtcctctgacgggcggccatcgagcgcgccctcaccgtcgtcgtcgaccctctcgctgctcggccgaggccgtcgcggaagggagagcgtgctatttgagtagcggatctcgaccttgtgccggccatcgtcgctgctctcgctgcttgaccgcgacgacgggcccgacgacagcggcgggctcggcgggagcgtcggccgggtctccggtccgttattatcgaccttacgcatgagaccctcggcctcgtgccactcttcggcaccgccagatgccgtgctgtcttcgctcgtccgtcggctctgcggccgtgaggagcgggacagaggccggcggagcgagaccgcagactgcgagtgaagggcgtaggcgtcggggccggagccgtgttgcgaagacgagtcggcgaggataagctcgccgagaagcgcgaagggcgcaaacatcgatacgccccagcaaaagccgacaactgcgtgggaggcagcctcagatgtcagcgctctctggggcggagacttgcatgggagatgaggacgtacccgagatgacgaggttggcgccagagacggttgtgacgagcagggtcgcgaccatggcggccgcaaagacagcgtgcgagatcatccagaccatcccgagcgtcgcccatcggaagggcacgcgcgggacgagccagcgcggcaggccagcctcggaaagcgcgtctcgcagccgtcggttcaggccatcgtcgttctcgtcctcgccgtggtcgccggcaaagggcgcgatcagcatcggtagaaagatggcggtgacgaacgagacggcggcgttgaagaagagggcgcgcgagccggcacgggtcgcgtcgttgtacagctcctcttcggagagggtcgaaccggcggccaaagcatcaagcttgtagagatcagagacccagaccgaggtgtagaagagcacggggaaccagccgatcctgcgagtgcgggtggtgaacgggttagccttcgacttaggtgacgccgttcgagagccaggccgcaccaggcaaagaactggatgaagcagagcgtccgaatgtcgggcggaagggtgcgcatgttggaccagatggacttgagagtgctcaagagcgtcgtttgcggccggctgcggagggaagttgcagggtcaggcaggctcttcggcccgtgcctggcggcagggtcaatcgacgtacgagtcgctgataagcacgcgctccttgaccgaataggtcgtcagaccatgcgtgccgatgaggacgaccgtcgtcaggagggttagggcctgcagctgcgtgctgccgaggaatggcagggccttccggatgtcaacgttgccgctgtcgaggcagaagagtaactgagcgtcagcgatggtgtcgtctcgtccctccaataggcagaagacctacacccagaagcctgcgacagagccaaagccagccagtcggcctgcccaggcgttaccggcctcctgctgcgatggtggtagcgagtcaactagaaacgcatggacggcgtccgtcagcgatagtcaccttcaagcacatccgatcgtcgctcatgcgacgtacccagcagtgccctatcggcagccatgactggtcgaggggagagaagccagggtcagctgggcgaggaactccgccgcaactcgctgcggcactcactcgcattgaccgagaagtcgacgaggaagaccgcaaagatcgcgactgaaatggcgattgccttgccgatgcccttttctgggtcagcaaagacgccggcgatagaccgcgcccaaccgaggagcaccatggcgatgatggtgatggcgcagccggcgacgatgaacggcctccgccggccgaagcgcgacttggagcggctgatgagaggcaagttggacagagccagttaatcacgagagaaagcaagtccagcgctcatacacatactctgcgatgctgcctgctcggagggaaagactgtgtcagtatgcaagcagaggggttggcagcgttcggggcgattggcgcacctatgagtggctgcatgatgagaccggacagcgggcctgtacagaagagatgtcagcctggccatgattgagaccaccgctcaccgatgggaagctcacctgcgacaaagacgagactcatgaggctcttggacagaccgagctcgaggaggtacggcgaggctacgcgcggttcgagagacgcgcgcgcgaagggaggatgccaaggtaggtcgacaagtcagccggcgatgctcctgcctaggggttggaaggacctgcaccttggctcatctcaatggtccagaccgcttggacgccgagcatgccacttgtcaaaagagggtactgcaggtaaggcagggctcggagggtcagttcgacgcggcagctcgtgtcttgaagccggccgccagtctctggctgagatagaagcagacagaccttcatccattctggaccggatacgctacgaggcgagaatgaggtctttgatcagcctcaggtgccacagtcaccgcgacaggagccatccggtctgaaagtgagcccagacgtactgcggtgtgccgacccatcgcagctgcgtctcgtcctcgtcctcgcccggaaggacgaggctcggcccacccgtcatcgcttggaatgcttcgctgctggcgtgagcgatccaggagcagatgagaagtctggttcgtcaagagtcgcctgcgtttgcttgtgtcgagctcggggaggcggttcgagagcagtcgtcgaggccagcacacctcgggaggaggcttcggccgcgcgcagccgctccgaggccgcaccgccttgcctccgacgaagatagaccaagggcgacgaacgactcctcttctcctcgacgacggcgaccaccctgcaggcaggctcaggatcatcaagcctctcgctcttccccttcttccgcttcggctccttccagcatggccctcagactcgtccccatcgacctcgaggcacacgacgccgcttcgctcctgccgttcatggcagcggcccgggctctcgtcgaggacttcgaggcctcgttcgagcccggcgctcacgacgaggacgaccggggcgagggttcgtcgaggaccggctggcggccgagtcgcgcaggccatggctcgtccgtccacgtcaagacggctaagggccgggcgctcggcgccgacgtccgcgaccgggtcgggcccgacgagacgtggatcggccgcatatctgagcacggcaaggacgaggccgattgggacgaatggcaggtaggtctcgctccattgagtgttggcagcggtcgcttgggagcactggagggtagcgagggagagcacgaacggctggtgctccacagcgtctcagctgcgcctcctctcctctcacaaaccatctactgacggtcgacccacctgtgccttccagaatctcctcaaggacaaggaaggtgccgactctgagtggatcccggagctcaagggcctcgaggtcatccaggcgatcgacgttccgcccgacctcgagcccgagatgacgacggcggccgccgtctggatctcgcgcctggcgctgccgatgcccctccaggaccgggctttcctctgcctcgtcctaacgagctcgacgccggacgagttttggaacgtctcaattccgttcgcgcacgacaactacccgcccgggcggaaccgcgagtcaggccggacgcgcgggacgtacgtgagcgttgagcgggtgcgcaagctgccgtcgggcaaggtcgagtggctcgtcctgacgagcttcagtcgtgcgttgttgtctatactcgcctcttccgtcgtcgcctgacgctaaccggtttgcgtgtgctcttcccttgccgcactacagtcggcggcaacgtcatcccgcagccgatcgtcaatctcaagatgtcgtacaagctcgtcgacgacgttgaccactttctcaactgggtcgacagcagccgtaggcggcggcggacagtctgcggcggatcttgaatcttggtcgatgcgaatgacgatctcggcaacgatggcggccagacacgcacgcgaggttcagcttctgagatgttcagactcgcttgtatctcaaagggatacaaggagcctgcacctgctcagaaaatgcctgtccttctcacgatgtgctctttcgaagactttctcgtcgctgaaaactagcggtcttcgggatccagccgagtgcatcgaggcctcctgtgcgcactcgagcccatgcagctctaaccgtcggttctcacaggaggatcgctagtcctgcctgcagggccctaccctcgtatcgggtacgccgcctgtgctcgagccgtaatgtggctcggtgcgaattagtactcgcgggcgcgttcaggcccaggacgcgacgagagctcctcgtcaagcgccgctcacctccatctccgtcctcacccgtgctcttctttgacttgagctctctatcgccaggggaagcaagcgttccagcatggcctccgctgtcgcctcgagctcgacgctgccgccgccatccgtcgcctaccactgctcttgccagtttgccgacccggtcctgccgtacccttaccgaccggcagccggcgcgtcgttctacctgctcgcgagcctcttcttctgcgaggagtgcgacgccatcaagtgcgagcgctgtgtgtcgaccgaggtcgcctgctacttctgtccgcactgcctgtttgaggtcccgaacgccagcgtccgagctgagcttaacaggtgcgagccctcccccccgcacccctacctcgtggccctagctcttgactggctgaaacgctcccttcgctcctgaccgctgccctagatgcgcccgcaactgtttcaactgcccgctctgcgccaacactctgacggtccatgcgtcagagccgcctattgacgacggcacgggcccggcgccgccagaggcgtcctaccacctcgcctgcaacttctgccgctggagctcggccgagacgggcctcgtctttgacaagccgaccgggattgcacgtacgtcttcgctcgggccgtgagctgactgaatatgcaaggctgatcgtgttgtcatacctttgggcagttcagctgcagaagattgacgacgcgagcccggctgcagtcgagttcgaccgcctgcgcgagcactacgagccgctgctccggcccgccgctcctacctcggccgctctggcgagctcggctgctggccggacgtcgcacgtttcgtcgtcggttgcggcggcttcttccgcactcaagcgcaacgtccctgccctccggacgaagccgcggtcgtccgtcggccggggtagcgtcgagctcccccggtcgtccggcgacggcgatgagctcgtgccctaccgcgctcgaggcgatgctcggacggaagccggcctaacgacgccggtcgggctaggcgaggaggatagcgcgctctggctcggccaggtcgaggatctcgacggcgtcgcgccgctcgagtcgcgctgggcgtcggcttggcgacagtcgatccgtgcgcgcgacctcaggccaacacgcgtccacctccgggccaagaagacgcgtcggtgcatggactgtcggcatatcctcatcaagcccgagcagaaggcccagtcggtccggttcaagatcaagctgctcgccgccagctacctcccgacggtcgagatctcggcccgcatgccgagcgcagccgccagcgccgcgctgcgtcgcgaccggagcgcacgcatgagcactaccggcactcgctctggagtcgagatcgcagcgagcctggctgctgccgataaggatggcctgacacgggggagcaacgtcagtcgtcctcctctcgcgtcgcgtcgtcgactcggacgctgaaacttcgtccctctcgcagtacctctatcatctcgcgttcaccaacccgctgttcgatcctatccaggtcgagctggaggtcttgcatcctgttccagccgatgcatccgcgccgtcggacgaggcgacgccggcggcgacgtcgtcggcacacgcggctgatgctaccgatgctggagcctcacctgccaccgccggtgcggcctacgtcccggccttcatcgtctcgttcccggtgatatcgttctctgtcggcgcctttgtcgacgcctgggagtacggcgaggacgaagacgacggagtggacgccttgctcgaaggcacgccggccgaggagcgtggaccggccggcggtagcggctcgagtcggcgcaagagcgggtttggaaccgccagccggcgcggtgggccctatcttgagcgcaagggtaactgcaccaagctcggcatggatcttcaggttggcaaggaggctgtgggcgacctcagcgtgagtgcccatgccgctcgcttcctctcgacgtcctttagctgatgcgacctcccttgctttccagttcaccctccgcgtttccttcacctaccgggcagacgagggcgcggaggcaagtgcagagccggccgccaacggcggaccggaaggcgggcagcaggacggcgggctaaagacgtttgtctttgacacgagagtgtgcctcggccgggttgagccttaaggcgacggacggacgacgatcacgacgcaacgatttctcatgacctctctcacgatcacggacccccttcgtcgagaattcatgcgcatcccgtcatgcgctccagaggtgcacgaggtggtcgtagaaggaggcgctaccgacgagcgtctcgccgccggtggcctttgtcgcgtagctccagtcggcgccgtacgcgagactctcgtgcccgtcaaagcgcgtcaggagctcgctcccgatgacgttgacggcctcgccctcgctctcagccttgagccggacgactttgaagccgtcgtgcatgcaggcaacgagaatgtcgtttgaccgctcggccgacggatgccacttgacgcgccaggcgccgcctccgatgtcgatcggatcgatgagcggccgcgaggggtagcgcgggtcgagcagggtgagcgtcgagttgtacgagccgacggcgacgacgtttggccggtgaggcgacgtctggatgcacgtcacgccggcatcgaagcgcttgttggtccagattggctgctcgtcgtcggttgtgcgaatatcccagcctttgagcttacagtcgtcgccgcctgtcgatgttcaagacgggccaagattagtcgtgcggctgacagtgtcttcaggaacgagactgcgcacccgagtagacgacgttagggttccagccgtcccacgaggcgacccaaggctcataggcatgcgccgcccaagttcgatctacgacgagctctccgttcgacgccggaacaagatgcgaaagcgaaaggttggagagcgaggcaataagtgacgggcttgtgctcctgaggacgaaggccggattcagtcggtataacggagcacaaagagtcgccagagaaggaagacgcacggggtgatgcgattcgaccagtcgagcgagagaacaagcgtcgtcggatccgtcacctggagcgtctgtcgctctatgaggcgtttctgcgtacagtgttggtcaggaagccgctgcgcgagcgattctgccagtcgccctctcgctgaagactcaccgtctcagcatcccaaacatgcgtcactaccctgccctctgcgtcagccactgcaaggaccgcctcttggtccggcgtgagattcgggttcctgggtgaggaagcagtatgcgacgtctcagcgctggacggacgtgttgactgctgcagtcaagcgcaccacttcatgtccagaatggctggaccctccacacagtgcttctctgtgctgcgaaagggaagcgaagaaagtcagctcttggcgatgtgcgtaacagtgaggaaggacgtacaagccctcgccgtcggtctcatagacgaggcagcgcccgcgccgcttggccgccggcgtcgcgaccatgttaccgtcgtcgtcgtagccggccatcagctctggctcggtggctggcgcgccgcccgcctcttcaggcttctcgagctggtaggtgccgacagtaaagatggccgggtggtgcggcgagaattcgagcgagtccgcactgtagacggtgtcgaccgagctgcgagagacagctgcgaccagaagctgccttctcgtcagcactggcgtaagcagatctcagaggaggactcccgcaccctgcattttgtcctgaagctaagctgagtcgagatagagagggacgtcggtcgtgatcgttcgaaggacgagccagcaggtcgcagctcgcggagacgacgcgtccctgagttgacctccgtccgccatcagtgtcgtccggctcagtcgctcgcctcctccaaaccccgttcgttgcggcccacgcggagtcaagtctggggtttgagcgacgtggctgaccacctcccttcttgtagccccgtccgaccgctcgcactccccagcattcgcctcctccgtcgcctggcgccgctgtcgcgctcggcctgggtcccgaccaacgtcgtctctcgtcctcactgcccgaggttcttggcgctgcccggctgcagcgtcgagtggcgccctctgctgtttggaatgccccctaaagtcgtctgcggcaatccgctgtttctacagtggctcgagggtacgccgccgccgccggcacgcttccgcctcacccccttccgttcgcatccagaccagcggtgctgactgcgccttcccatgggatcaacttcagaggcggccagtgacgccgccgctaagggctccaagatggagttcgcatacaagaaggcggccaagtcgctcaagcagtgtccaatgacctttgagcacccggagcagacgcgccagctgaacggtgtcggcgacaccatgatcaactagtgcgtcgcttgtccgtcggcggctctggctcgggcctcggactgacgcaagcgggcgacccggctctcgccaaagtctgacgcggaagctcaagcactattgcgacgagaagggaagcgcgatgcccgacagtgcgcagctctcattctctgcgcacgcgccgcgtacccttccggtcgctgaccctgctatctgctccctgccggcgcagagcccgcaccggccaagaagcccaagccgcctcccgctaccaagaagcgcaaggcggccgcttcgcagctgccgactgacgaagaggacaacgctggcggcaacgcccgcgccgggccgagcacgtacggcgggctcgacgcgccgctagctccttcgcgccgggctccgaccaccgggagcgagtccgagtcggacgacgacgatccagagttcctacgccggatggaggagatggagaacggctcgctggcggccaaaaagaagaagaaggcggcgaccaagaagccggccaagcgctactttccaaagcaagcctcgggcgcatacgcaattctgctcgcgctccactcggtctcttcggtcgaagatatgcacgccgagctcagcaagaaggagatcatcgacatcgccgaggccaagggttggagcgacgcgagcttcaacaagccgaaggacggcggcttcgcgactgcatggaacgggtgcgtctcgggcggcgacacgcttgcttgctttgctgcctgctgacgcattttgctctctgccagcatgtcaaccctcgtcaggtgcgcccgcttgcgactgctgagttggtgttgtgccggctgacacgtgaatgccttccgccctcgtagcaagggctactgcatccagaagggctcacgcatggctaagtttcacctgtcggaggagggcttgttagtggcagcgctttctacgctctgcattggacgctgacaaatctgcgttctattgtccgcagcgaggtcgcccagctgcagtacgagacacttccggtcgacccgtatgagcaggatcggctggacagggtcatacggctcgcctcgctctcacagccgacatcagaaccgacagtagcttcctcgagtcgagtcgaaccatccttccaggtcgacctggacggcatccctggctcaagaaagtcgaccgacgcggcgccgccctcgagcccgctcgacccgctgaacgctgcctcgggccgtgatcttactagcgccgggcgcgaggccatgctgcgcgcgtcaggccgaagcgccggcagcagcgcctcaacctcggcgccggtcgctgcgaattcagccaacgcgacgacctcgcaggccaaaacgtcatcctcgcgggcggagcgcctcgccgagatcctcgcccaggcgacgcatcggtcgcagtcccagcagtccgctccgtcggtccgcgccttttctacctcgagccacctggctgtccctcagccggcagcggccgcaaacctctcacggccggcgccgctaggtggcacgtcgcgaagcccgagttttgacggcgggccccatcagcggcaacgatcgtctgcccagatcgcctctgccggcggcctagccgacccatcagtcagcatcgacgtcgactttcggccgatcatgtggcacgccggctcgtacgagatcgtcctcctgatggaccaccgcgaaaagtcgggcaagcgaggcgagcagggcgcgatcccgctgcgggagcagggtgtgcaggcggaaacgtccaacgacatggtcctcggcgacatcatgtgggtcgctcgccggaccgacggcggccaggaaggcggaatccagtcggtcgtgctcgattacatcatcgagcgcaagcgccttgacgatcttgtctcgagcattcgcgacggccgcttccgcgagcagaaggtgccgtccctcatcattgctcgtcgccgcctttacaaacgctgatcctctaccctgcacccctgccgttgtaggcgaggctcaaaagctcgggcatcggtcaggtcgtctacttgctcgaaaagtttcacgtcggcgagcagcaggacgcctggtggtctgcagtcacgacgtccaagtcgtcgatgcagatcattgacggcttctttgtccacgagaccgacagctgggaggggtcgatcacctacctgaagagcatgcacgaggccattgttgacatccaccaggtcggtgtcctctccgtgttactcatggcgcccgccctcttgcccgggtgactaaccacaaccctcgacctatcacagaaccaagacctctacatcattcccgacaatcgcatccaccggccgacgtacagcgagctccagcggcagctgcggctcaagcacccaactaagccgcacctgacatccgtccaggccttcaagcggctcaactcgaagaacgcctcgatgacgcaccgcgacctctggtgcaagatgctgctcacaatcgcaggtctcagtccagagaaggtcgccgccatcgtcgaggtctatccgacgccgctctcgctcagtcgggcgttcaaggaggccgaacacgttgaacgggcggcgagggaatcggcgatcggcctcaccggcaaaacgcccaagatcccgctcgccgagaacctgcttgtcaacgacattcccggcagcaaccggcagaaggtcgggccggccctcagccgtaaaatttacgagctcatccgcgccaagtcgtaccccagtgccgccggcgccgactgaggcgctggcttcactcctcctctttccactcgcgtcccccttccgttcagtgttcacgatcttacgaccatcccacacgtcttgcctttgtgcttgcaatgcatccctcttcacgcccttctgctcgtgcgagcgcgtggcgacagtcagcacatccatcagaccatctcgccccgccgggggccaatcagcccgccatgagttgcgtcccagatcttgcggcctcggaggaacgtttgcctgcgatcaaccaagcatgtaagggtgtcagaggcgacccacccttgaccaggagctgcgcttcgctcacgttactcggccctcaagcgtcgccccctcgaatggcgagatcttgttcttgaagagcaggccgtcctgttgcgtcgattggtgggcagaaaacattcagcattgatgcgaacgagccagcgccggacgacctcaccttaagaacctcgaagcgggcagagggatcgaagactgcaggggaagagtcgcactgatcagcgcacctcgctgagccaaaccatcgaacgccccgctcgcacctgcaaagctcgcatcgaggccgacctgaatccgacccttggaggcctgtaagctgactcgcgcggctgttcgctccgatgtccagcgaatgatctcggcaattccgaactgaactgcttcaggtccggtcaggcgccgccgcgactcggtccagagcagcgaaatgccgaggccaagtgacgagatgccgccctgaagcatcacacgaagtcagtacgcgtaagagatgcttaagagggaacgggcaacgcacccaagccgtaaagaagtcgccggtgcaggggtttttgagcgacggcacgcaagggctgtggtccgacacgacgtagtcgatcgtgccgtccactgcaagggcgagaggcgggtcagcgtcgcaaggtggctggtctgactgtaagatgcgcaaaactgacggagcgcttcccagaggagggcccggttggcgccggatctgatcggcgggcagcacttctgtgcaatcaacggtcggggtcagcgctgctggtctgctcaagcgctgcgaaaggcctcacaaattcggtgtgtcgatctgggatcgattcggcttcgagactagggatggtcgacggtgatcagttgggggtcgagggtgctgagtggctcagatccgctcaccagaggtagtggtagcacgtctcgacggtcaagtcgacgccgtcaagtttcgcttgcctgatcgtagggagggcttcggcactgctgagatggacgatatgaagcggcactgtggggaattctcgcccgaggcggacgatgagctcgattgccgtcgtctcgtaggcatctggccgggaggcgaggaacgacgagtagagagtggcatcaggtgcggcagcggaggggggattagccatcggcatagccggaatgaccgcgtccatctcggcgtggaacaaaagaggcacgcctcggccctgccaatcgtgcagaagaggtcagtttacaagtacgagccatgggacaccgactgctgacctcgagctgcttcaacgccttgcgcaggtcagactcgtccacgcaaggaaactcgttgacaccgctctcaatcaggaagcacttgaagccctttacgcccgcctcgaccagcggcaccaggtcggcctgcagagttcgcgcgcagcagggtcgtcagcgatctggcggccagctacagcggagagagcgacgtacctcgttgccagggataacacctccccagaagccgacgtcgaccgagagctgcgggccggccttgtgatcgccgccgaggaagctctgggctgcctctcgcttggttgctgaacgaagcgtagcgcgtagcaggcgtcagcagtgtgggcgttggcgagcggagaaggctgctcggatgctgactgaggccagcgactgtcgtcgttggcgggatggagttgagtggcatctgcagcggagcgacagggctcagcaacgtcagtcgaggagaagctagagaacaggggacagacgtcgatgatcgtcgtcacgccgccagaggcagcagcatgcgtgcccgttgcgaagccctcccattcggtccggcctggttcgcacatgacagcggataggtcagctaagggtttcaggtgccgagcaggataatacggacctggctcgttcaggtggacgtggcaacttgtcgtcaggtcgggtcgggtccgaatgcagccggtcggggcgcctagcagtcagctcgcctgtcttgctcccctgacaacgccagcagctgctacagtacgcactcgaccagtccaggtagcacataggcctctccaacgtcgtcgagattgtcggcaaaagcgtcgaccgaccggtagccaggcgtgatggcgaggatcttgcccgaggcgggtgagaactcgaccgtcgcaggcgccggggcttggcttggcaaacaaacgttgtgcgaggtgacgaagcgagacatcgctccggaagtagggtggagagaagagatttgggctgctgaggtagcggcagatgatggaaggtcgggtcgtcgtcggcgacgtgagctcagagatagggagggctgagagcagaggcgcagcggccacctccgacggctgatgcggtcgccaagtctcgcggtccttgcaagcgtacaagaaggtccatcattcggcagttcaaccttctagggctacagaaggacaggagacgatgcagggtctggtgtcacacacgaaagacagggaggcacaatggcggcagcgagactaaggtcgtgcacctcagcgccgagcacaaatccagtcgacaaactgggtgatctcggacgagcagcggttgctgatctgcttatcgacactccgctgggggacgttgccgcctacagtggtcggcagtagtagtaagcgtcagtggctaggattccgtaactacggctgctcgaaggcggagagacgcaccgagcgtgaaggccgtgatcgagatccattcagtcttgccgctggggagtttgcggacgcgctcgacagcagtctgcctggcgcggacccggccgtgctcgtcgcccttgcccggctacacgagaaagcgcggaaaaggggatttcgaaagggtcagcgcacgctcggcaagcaagtcgagcgtaactcggacgacgactgaccgggaaggagtcgtcttggacgggaacgctgacgttccagaactcgtcgtcagccgtggccgtgacgacgagtgagaggaacgcccggccggcgagcgggaacggcatgtcgagctgcgggatgtggacgatagcggccgagtgcaggccttccggcagcgtcggaggatcgtaggtcgagatgacgttggccgccggaagctcggtgacgtgctcgccgcccttaccctcctcgtccttgagcatgtgctgcggagggttggcagagcgagaggaagcaggatgtgagccgagccgagctggacccgactccgaacgacgagaagacggacctggtagaagtcgtcgtaggtcacgtcgtcgtgctcactgatccggccaatccacgtctcgtgttcgtcgacgagctccttggtcgttgacgacagccgggcgcccttgcagctcgcgacgcgggcctcgacgccgtgggcgctctcggccttccagcctgacgatgacgacgatgcgaggccctgctcaaagtcgtcgacaagtgcccgggcgtcggcaaggtaggccgcaaagttgcttgcgttggccgggacatcgatggccgtcaggctgagtctgggcgcgagcgaggtcgatgacgacgacggcgacgagctctggctgccagacggcgacgatctccggaacagcatgcgtttggcagacgagtggatgagctgggcgcagggcggatggaggaggaacgcaagcgtcaaggtcgtcggcatgcaaagagggttggacgttgagggaggcaagggagcgaggccctgctgttggcctctcccgtcgtgcacgccccgatgcgcagcggccggcgttcggtcatcgagcgagcctagcccgacccatgaatgcccggacccgacatcaccctccgtcgtcgtcgtcgtcgtcagcccggccggacgatggatcagcagcatgacccaaatgtctttgattgtcgacaggcgcatcagtggcgcgaggtatgtgcaggaaggtcgctgctcgacgccgtcaactccagcagcatccggctgcgcgcgaagccgggaagcgagccgcggcaactgctgaagccggtcgatatgggccaggagcgctacgagtcatgttgcgattaagatgatcggctgcgaggcgggcctggagctgatgaaaggggtgctgcgcccggtggggggtgaggaggacaaccggtcgcaaccgagtcgacggcttaaggcttcaaagcagaagcaaacgtcgagcagttctcgacagcccctctctctgaacgctggcctagacaacggcttgcagcgagaaagccttctcgaggcgctgacaagaacctccggcgggccaaaaagaagagtaacgtgtgcagagccatcgataaggatccgtcgacggccgagcgcaagggaaaatgtaacaccttagttggtgggcttggcgccctcggtcgagtaggtcaggccgcactttccgcaggtctggcggttcgagtgccaggccatgaagatgccggcaccgcacgacggctgggggcactcgcgccggaggcgcttgatcttgccgtccgagtcgaccttgtagtacttgaggatggccatcttgaccttcttgcgcttgtgcttgatcttcttgggcgtcgtgtactgcttctttttgcgcttcttggcaccaccccgcaggcggaggacgaggtggagggtcgactccttctggatgttgtagtccgaaagggtccggccgtcctcgagcctaatagtgggcaggaagggcaggaaggagaggtcagcaactaggtcaatcggatgaaggtcaagcgagggagggcacgcactgcttgccggcaaagatcaggcgctgctggtcaggagggataccctccttgtcctggatcttggccttgacgttgtcgatggtgtccgaagactccacctccagggtgatcgtcttacccgtgaggctaggcgggtgggcggccgagagtgaaaagaggcagaagggcgaggccgaggaagaggcacacgacaagaacaacgagacaagggagcagcagggcagacagtcagcaatagggcacgacgggcgaacgagcaatgggggcagtgccgtctatgacaaggaggacgcacgtcttgacgaagatctgcatactggccaaagtcttgacgtccttgttgctggtaggaggcaggagaggagcgaggagctcgaggctttgccccttgcgcgccgccgcgcgggcgcgggcgggcgggcctgcggccgctcgaaaattgacggccgggatccgacggattctggcccccccgcgccgttcgtccttcaagtgcatgcagccacgccggcgcgctctccccctctgtcaggacagtcctagaaaagtgcgtgtgatagaagccaagtacgggagatctgccctcctgcgcgcaaccatccggtcgcactgcgctcagttgcgcgaccgaccgcggccgctgccgctgcgcgtcccaaagccaccgctgccatccctcgacgggccatgcggctggcgggcgacgcctgcatcaggaccgccgccaccctggtggccggacgaagagcttggtggggtccgtcgtgatccgtgtccgttgccgccaccgctgccgccgccacctgaacgaccgccggcgccaggtaacggagcggtccctgcgccgctcgccgtcccaccccctccgctgccggcaaaaatgcgctcgcgcgcaagccggtattcctcctcccgctggctcagcgtcttggtcggcggggtgttcctgccagagttcgcgcccgagcctgtgccggcggcgggcgacgctgtcggccgcttgaggagggtgatcttggcgcctccaccaggaccggccgacgcattgggcgacgtcgtccgcgacgaggacgcattggacgagacgccgagcgagggaaactgattctggctaaagatgagcggcggggccgtgttgctatgagaggggagagggaacgcatgtcagctcaaacgtcaccgcctgacaacgacacctgcaagtgacgagaagacgcacgcagcctcccagatgcgtttgttctggtcccagccagctcccgacgagcctgcatgaggcggagggagcggcgcacggccgtagcctcggtaccagccgtcgtcgtcaccgccggcgccggcgccgtagctgaagctgcctgctccgccagcccgcgggtcgaactgcaccggctggccgtatggctgtgggtggtaacccatgcctgccgcaagaagcgggcctgccatctgcgagcgagggacaaagtcgtcctgtttgagcggttaaaggggatcagccaggccggctgagggagacgaggagccggcagcaggttcgagctcacccgctcccagtcgtcctcggcgccgacaaaggcgggcctcgccggcagcatttcacgaagtagttgaccggctgagagacaggcagagaaggaggctgctcagggcgccgagcgcatgcggcggcgagcgggctggcagaggaggaccggtctggcaggatgaacgtcggggcggcgaccgctagaggccaacgcgcgtacaagacaagggcagcgccagcccagtgagcgcacgccactggagctctctggaccgctctttcatcctgtcatacggtctagctgatacacttgcgtgcacgaggatcaaaatgcggtctcgatgcttcgaacgaacacggcggaggttcggaacagggcgcatctagaggacctttttcccgcgcagcacccaggcaagaccgtagacggcagcgctgtacgcacagagcacgccgagcgccttgcctcggccggccccgagtgtgtcgaccgagacgttgacgagtccggtcaaaaggttggcctgggagttgtgcgagcgatcgtcagatggggagggtcacggtcgttgcgcctgatgcgggcggactcaccgagaggaagaccactagcgcattgcggttggccgcctgcaagagtggcgggagtcctgcggccttcctgggagaagacaattttgaagcggcaagatcgtcgtccagcccggttggagctggaaaggcgagctggacgaggaggtagccgaggaggaaggacgtgttgaaggcggccgtccagaggacgtagggtaggttggcctgtttggcaaggagtatcggactctgaaagtcagcgtccagatgctgacggcagggcgagcaaaatctgagtctgaccagtctccggctgacgtcaataccgacaatgcccctgcacaaggccagccacgtccagaagacggcagcgaagccgagcaggacggggacgcaaagctcgggctgcggttgggtcgccttagttggccggcggacgctgtcgacaaagtatggcgacggcggcagtagaaaaaggcccaagtagagacccaggaggtagatggcaaggtagcctggtgatcaaagaaagaacttcgtgatgtcagccgtttggcagccgtgacaggggggtcaacggccgcacctgggaaggaggcgagaccctccttgttggccgcaacgagattgacccgctcggccgtcagcacccagtcctgcaggccgccgatcatcaaagcggcctggtgacctgtgctcagcgtcaaaacgaaagctttgtcagcagaagaactgcaatttgggcgctacatattcctcgcacgcaccaaacgacagcagcacggccatcgcgccgaacgagagaccagacgtcaggccgtagagcgcgtacccaaacggaggcaggaggccgagcgtgaagaagaagttccaatggacgccgtactccgtgacatgctcctgaaggtcgccgacggggtctgatcagcgctgagagagtacaaggggtaccaagctggggcgcaccggatactcgatgcccttgaccatcacaacccggacgaggcctagcagcagcgtagggatgctcttcttgacagagcgccagaagctcggccagaggttggccctcgaaaattgattcgggggcgcgaggaaaggccgagcgccaatgataccgagcgaaaagacgaacgagccaacaccgacgtccatctgacgggggcggcaccagtcgtcagatggaaacggacaggcgatgagacgggccgcatcgacggctgacgtacgagtgatgtcccccagagctctgtcttgccgaaagcccgggggaagatgcggaagtcgacggcgaggattgaaacgacggtgatggccatcatgtgcgcccggtagacggtcaggtacggctgggccggcgctcgaggttcaggctcgctgccacttcgtgagcaaggggtagagttggatcagtgggaggcgccttgcaggagtcggacctggcccaggctcaacgcacctgctgcctgcctcggttttgttaccggcgcagtcgccgctatcgccgtcagcgtccacgtcggcctctctgataatcttccggcgagtgttctcgtctcgacgaggttcattcgcgccggacggctgcttgccgaacaagacggccgagacgagcaggaagccgacgaagagggccggctgcgcgcttgcgagcgtgacgccgatgagcagcggcaggacgccgagcacatagtcgacgataggcgagctcggtagacgatgagcgaccgccgagtgtagaatgtaggatgccttccggtcgcaagagtcggcggagctcgaggtcagcagcgtccacaggactccttgtgagccgttgagccgtcaggatgaggcggccgcctgcacctcgtgcgaggttgttgacgccagccagcctgggcagagagaaagaggactgacgagaccgacggccgagacagcgttgatgatgtggaccgacgtgccaaggttgtcgctcacgaacgcctccttggccgccttgtacgacgtcgacgccatcacgaccggaggtctcgaggggttgagctgacggctcgcgactgtctggcaaggtcaaggcagtcaatggtcagctcactcttgaaagcggcgacaatcacgctacgcacggaagtcgtccgagctgaagagcggtaggtgtcgcaaggtgaggcgcctgctgctcgtcgttggtagggagaacggcaggcggagctgcagccgggaccgtcggcaggacgagctctggtcagagcctggtcgtcagcacaggagaaacctagctctctcaacgaccgtcgctcagcatgagatcacacagaatggcatgcctacgccctccttcctcctagccagctcaagagcgaccagctcaagattgagcaggcaggctctgccatctggccgtcgcccgatcctcctcggattcccacgagactctcggccatgtgcgcgcgtcggcgaaacccccgcggcgttcttgccgtccctccgattgccgtcttccttccttctccgtccgatccttcttgactcttgctcctgcctgctatttagacgtcctccagactagaggaggcacccttcaagaatgaccggacctccagcacgtctgccacggacgctcgtgatcgacttttacgactcgtacacgctcaatcttctcacgctctttgcgccgtacccggacgagctcgtccgtcagcaggtcgtcgtcgtccgcttcgacgcctacagttggtccgtccctgccagctagcgagaagggcgcgtcgctctcaccgctaacctgacctcctggtcgcatggcctccctcgctcggtactgcaggaacgagttcctagccgacgtccttccacactttgaggcaatcattctctcgccgggaccaggcacgccggccaaggaggccgatttcggctgggcagcccagctcgttcgactctgcccggtcccgatcctcggcgtctgtctcggcatgcagggcatcgcgaccgccctcggcgctgaggtccgcttcgccggccggatcgagcacggccagcgcgtcgcggtcgccaactccggcggcggcgtctttgccggcgtcgacccgtcggcgggcaagtgggtcgtctacaacagtctcgtcgtcaacagagaaagtgcgtctctcgactgtcgcagcagatcatcccgctcttgctgactctgcctcgcttgcagccctgccgagcgaactccagatcgacgcctggctcgagtcggatccgtcgcagatcatgggtctctcgcacgtgtcgaagccgctgtggggcgtgcagttccacccagaggtacgcctactgcctaacgaaactctctcacgccgtcctgacccttcttttgcgattgattaccagtctatccactcggacctcggtcagctcgtactccagaacttcttgcggctcgccgcggtggagcctgcgcgcagtctgtcatccgccgccatccccgacgccattctcgcagtatcagcgacagcccggcacgagggcgagccggcaatcgtctcgccctctgccaagcgttacaagctcgagatcagacggttcagcgccggcaacggcctcggcgctcagcgtgtcttcgagacactcgtccagggcaacgccccgggtgacttctggctcgacagcgccatggtccgtagtatccacgcgccgaaccccattttttctgcgcctgactcatcttcccccccccccctcacccccgctcgttgcccgtcagaaaaacaaccacgatgcttcgccctcgtactcatacctcggctcgcgagctcatagtctcacctactcaacaaagaccgggctcacgctcttgaccactggtcagccaattaagccgatccagagcgacgagcccttcttccacgccatcaacggcctccagcaggcgctcgctgcccagacgacctttccgacagccgagggcgggcccgattggaaggctggatgggtcggctggatgggctacggcctcaagaacgaaacgctgccgggctacggctctcggaagggcaaggagcgccagctcggcgagcggcccgacgcgcccgacgcctgcctgagctttgtccggaccgtgctggcgctcgaccacacgacggccgagtggctcgccatcgggcttgttgagacgggttttcagagcggcaaacaacagcaggccgggcgtgtgactcgcgggcttggagcgaccttggaggcggagggtgtctgctgggcgtcgactgaggccgagtggaagacgtacctcatcgagtgtgaagcggtgctggcccggctcgcagcggaagctctcacgagcgattcacccgcgcggacgacgctgccggccttcatccccgacttttcgggcaaggactacgttgaccggatcggcaccgcacgcaacctcatccacttgggcgagtcgtacgagctcacgctgacgacccagttccggtcgacgctgcctgccgaccggacgccgtacgacctctacctgacgctccgggcgtctaacccggcaccctactcgacctacatcaacctgccagaactcgacgtcgctgtcgtcagttcatcgcccgagcgtttcatcaagctcggcaaggatgggacggtcgagatgaagccgatcaagggcacggtcgctcgcgtcaagggcgaccccgtccgggacgaggccgtcaagaatgctcttcaaaacgaccgcaaggagattgccgagaacctgatggtgggctcttctgctgcggagtgcacatcgcagagaatggccagctgactccttttgccttctcagatcgtcgaccttatccgggccgacctgctgtcgttctgccggccgtcgtcggtccaggtgccgaagctgatccaggtcgagagcttcgatcacgtccaccagctggtgacgacggtcgtcggcgagctcggtgaaggcgtcggctcatttgaggccatcggccggtgcttccctccaggtgcatctggcccttgcaccagatctgagcagcaaatgcccggccagaagctgacggccacccttccgcgactgactcttcaggttctatgacgggcgcacccaagctgcgcagtgttcagatcctcgacggtctcgaggacgagcgcgaacggggcatctactctggtgcgactgcgatctttcaggatccctcctgcacttcatcgactgactcttgtattgctcttgcctaggtgccatgggctatctctcgctcgacggcgcggccgacttcaacgtcgtcatccggactatcatcgctcaaggccagggtacatgctttcgcttcgccgctcctgcccgctcgaggcgctgaccgatgatcctcgcagacctcacgatcggagccggcggcgcgatcacctggctgtcggacgcgcgtgccgagtgggaggaggtcagcgtcaaggtcggcagcgtcctcaagggttttgacacgacggtcgatctatgacaggatctcgcgaagatattctttgggttccaagagagagtcgtctgtcggacagagacgaggggcgatctttcagggggactgaggatcactacgacacgagagaggtcgacagttcgaccaggctttccgctttgcgacgcaagccggctcgaagctgcagcaggcggccgcatgacagaacgaccgatagagccgctcgagtttcgacaagtcgtctcgcccgcttttgttttctcggcccacttcgcgcgcgcggtcgttcgacctgggctcgctcgtcgcgtcgcgcggccgccgcttcgctcttgcacttaaaccccgtcgcccgcccttctttcagcccaccaccaccaactcgcccttctcacgacccttctactccttctccttcccttctcttcaccatgtctgagcgtccctccaatgtcggcatcctcggtatcgaggtgcgtctccgtctccgagggatcgggtgtcggcgcgtgccgccggctccccagcgttcctttttgctcgcccttccggaccccgcttgcccttgtgtagcagcggccggaaggtgtccctttctagctcagagctcataatgctgaccggagcgtgttctttctccctctctcgccttgcagatgtacttcccccgtcgggtgcgtcttcattctggtcgctcatgccccgagtcgtccctctggttcggcgcgtcgtccagcgttctgatcccacttttgatttgcttctgccaggccgtcgcccacaccgacctcgagaagtttgacggcgtctccgagggtaagtacacgatcggtctcggtaaccagttcatggccttcaccgacgaccttgaggacatccagtcgttcgctctcaacggtgcgtctgtttgcttccctttcactgccctgcccctgcacctctcacgcgttcggtcggggtctccttggcgggctccacccgagctcccaagttgcccagagtattgatgcatcagaacacctcgctgaccttgattcaccctctctgcctgcagctgtcgccggcctcatgaagaagtacaacgtcgaccccaagtcgatcggcaggcttgacgtcggtaccgagtcaatcattgacaagtccaagtctgttaagacggtcctgatggaccttttcgagtcgcacggcaacaccgacattgagggaatcgactcaaagaacgcctgctacggcggcaccgccgccctcttcaacgccattaactggatggagtcgtcgagctgggacggccgcaacgccatcgtctttgccggcgacattgccgtctactcggagggcgctgcccggcctgccggtggtgccggtgccgtcgccatgctgatcggccccgacgcgcccatcgtctttgagccgacgcacggcacctacatgaccaacgcctgggacttctacaagcccaacctctcgtccgagtacccgatcgttgacggcccgctctcggtcacctcgtacgtcaacgccgtcgaccaggcctacgccgcttacagccgcaagtttgccaagcgtgccgccggctcgaacggccacgcctcgaacggcactaacggccacgccgcctcgcccgtcacggccgcctcgtttgactacctcctcttccactcgtgagtgttcatcgggtcggataattgttctcatgtatctcagagactgaccttgctctcccgaactcgcaggccctacggcaagcaagtcgtcaagggccacgcccgcctactgtactcggacttccgcaactcgcccgaggacgccgcctggtcctcggtcccgcaggagctcgcgacgctcgacctccagaagtcgctctcggacaagaacgtcgagaaggccatggtcgccgccgccaagccggcgtttgccaagcaggtcgaggccggcatggacaccgtccgccggctcggcaacctctacaccggctcgctctttggcgcgctcgcctcgctcatctccaacgtcgagggcgagagcctcgtcggcaagcgcatcggcttctacgcctacggctcgggcgccgccgcctcgttctacgccgccaaggtcgtcaagtcgaccgccttcatggccaaggccgtcgacctcgagaaccggctcacttcgatgaagatcgtcccttcgcagacgttcgtcgatgccatcaacgtacgtcccgctctgcgccctttcgcgactcttcctcccaggcggctgactcgcctttcgcggctttctacagctgcgcgagtcgactcacaacgccgtctcgtacaagccggtcggcgcgctcgacaacctctggcccggcgcctactacctcgccgaaattgattctatgtggcggcgcaagtacgtccaggccccggctgacgaggcctcggcctagaaggacgaacgcctctcgctactctcatcccttcctggagatgtcgcgcgcttgctacgcctgccctgcggcctccctttgcttcccatctgcttgccccccttcactatcctgcatcaccctcggttgtgtctcactttacccgtctgatacccccaccgcccacctctcgccgcacacgatcttcctcgcgctctcctcgttcctgccgcagacgtccttctctcctctatctctctttgggtgccctctagaatgtaacgggccaaacaactacgggatcgacagtctggttcgtctctgttcgcgccaggcgtggaattcgctgggctctcttgcctggagcacctggaagcgcagagctctcagtcgctgaatgccacacagacaaagatgatacaagccgctcatgcgatagtggagttcgggcaaagcggacgcgaaatgagtaaaggggcaagaggtggggagggcgaagccaaacgggaacggagcgggccggctgaggggaaaccggttttgagcaggagggctcgcgcgacggagggatggcccggtgagaagaacgaccccaaggaacgacagaggtcgcttatgaggtcactgaagcacaggcgaggcggttaggtaggacaaacggtcagcgaaggggcgctctgccgaagctgaacgaaggaggcacaaggacgcactgtacgtcgagggctcgatgacttccggcagggcctcgaccttgacctcgaatcggctctggatggccgtcaggatctcctggtcggcctcgctcgtgatgaacgtgatggcgagaccgcgcgtgccgaaccgaccggcacggccgacgcggtggaggtaagagtcggcatcgcccgactggtcgtagttgacgacgatgttgacacgctcaatgtcgattccacggccaaagatatcggtcgcgacgaggatgcgcttctcaaacgccttgaactgccggtaccgctcgatactgtgacgagtggcgacaaggtgggttcagcgagggctcgccagtagagcaaactggctgcgaggaacacaccgctggtcctgcgtcaggccagagtgaatgcagatcgacggaaagttgcagtcctggagcagcttgtcgagctgcgtcgcccgctggaccgacttgacgaagatgcagacctaaagagatgaaagggacgcgtcagctcaacactctttggctcgggtcgacaagagagggcgcagaacggacctggttgaactcgagcgagtcgaggagctcgttgagcttccggttcttctccttctcctcgagcttgacgtagtactgctgcaggccgtgcagcgtgagcttggtctcgtcgtcgacgtaaatctcaagcggctgtattccgccgacgaccagatccaagatgtcagctctatcgcgctagacggcgctgactcaaggaaagcagcgggcagacgaacgttctgcatgaacttcttgcacgtgccgcggacctccttgttgagcgtggccgagaacatcatgacctgagagacggagaagagcgggacaggtcaggaccggctatcagaaggtcaaacaagaaaagcaaggcggagacagacctgcttgtggtgaggcgtcatacggaagatctcctggacatcgcggcgcatgtctgccgtgagaatggacgagcgtcagtgctccagcgcgcgcaactgtcgggcggtgatcgaccgggacacaccgagctgctcgagcagcttgtcgcattcgtcgaggacaaagtgcttgacggtcgcgccgttgagggccttgtcgcggacgagggcgttgagccggccgggggtgccgacgacgatgtgcgggcacttgtccttggacttgagcgtctcaatgtcggccttgataggagttccgccgtagaagacgctcgtgcggagctcgggcatgaacttggagaagcgggcgtactcgttcttgatctggtaagcgagctcgcgcgtgtggcagaggacgacgacggcaacctcgccgtcgaccggctcaatctgctgaagtgaggcgaggacaaagacggccgtcttgcccatacccgacttggcctggcagaggacgtccatgccgaggatcgactgggggacgcactcctgctgaacctcggacgggtgctcgaaaccgaggtccgagatcgcccggaggagctcaggcttcaggaggaagtccctggagacgcgcggcaggtcgaggtgattcggccggcggtcagatcaaaaagcaccgagagacggccgcgcagcggcaccaggaacgctggccggcgaagagaaagaaggcgacgtaccggaagccggtcgagtggatgccgacgtacgagcccttcttgtccttgtcgccgccgtcggtggcagcaccctcgcctccagcggcaggtgcgtcctcagtcgtcttggcaagctcaggggcgagcacctcatcctcctcgtagtcgacgagctgcaagtggcgaaccatcgcgcgacggcaaagaagggcgggcacgaagcggagggcgtggcgtgaggagcgatgggacgcaagaggagaccggatgggcggttcggccagacgggatgcaggacgcgcgtgacaggacaatgacaaccagaggcggcaagagagcagtcgcgggaacacgcgttcgaaggtaaaaggaaggagacgaaagcggtcagctctggatcggcgtgtcccatggcgatgggagaaggaggcgagcagcgggctgatccgccgcccaaagcctcccgagcaacgaaacaagacggacctcctcggtgtcggccatttttcaagcgtgtagaaagggttggggtaaaggagctgcgtttggccgaatggatgggttccagagagagagggcgagccaagggagcgcgtttttgcagcggagcggattgggcgtcaggacatggtcggagggctccgttggccggcggacgcgccggagaagcgagggccgggttgcgacgctgtgctgtgtccggcgccgtgggagcgagtgaaggagggccttacgggaagagaaaagcgagagaggccgggtggagagagaggaagagcagagcgagaggaggaggcccagccttcttcccccctgcgcgacttgtcacgcgacgcgtaaaggccgctcctacgatcgggcgtaaacggcggccgcgcgcgcgtctccctcgccttcgctccctcgccctcgccttcgctccctcgccctcgcctggcggcatcatcgacctgcctgaagccatcgcacaaccctcatcgcccgcccatggcttcgctcctgactccggcaccagccagaaccctcctccggctcggccactgccggccgaacctcctctcgtgcagcgctccggtcagccggctcgcgaggataggcgcgccgtcgcctccatcagcctcgtcctcatcggccctgatcgtgcgccgcgctcgcacgctcccccctaaacgcctgagttgacacgcgcgactccctcttgtagcaaccgccaagacggtcgctctgctcgagctcggtccgctggcgacccgaggcgtcccagtcgtcaaggccgccagcagcagcgacggccacctccgctccgacagcctcgtcggctgccgccggtgtcaactcaacctggccgagcacgagctcgcagagcccatcaaaggcatcgttgccttcgcgatcgactctaacgcaggggtctacgaaaggacctctggtcggcgagccgttagcgccgacgtcggccgcagcagcatcagcggccgacccagcgacggccctcgcctccgggcctgttcgtcctctctttcctctgctgcgcctacccgtcttgccgcctgacgtccactactctcgcttctttgcctacgacaggctgccgagctcaagcaggccttccaagagaacccctacacgtggccaaacctcctgacgctctcgcgcatgctggcctgcccggtcctcgcctatgcgatcgtccacgaccagagcgcgctcgcgggcgggctcctcgtctatgccggcgtgactgattatgtgtgtccggcgcgcgctcaaacaattggcagaagctgacttcgctctgcctcggttgcttgtcgcgccctaggtcgacggctggatggcccgccactggaacatgggctccgtgctcggctcgatgctcgacccacttgtgcgccctccaaccttactgtatctctctgccgatcgttgacgacctccctccttcatctggcactaggccgacaagacgctgatggcgacgctcgtcggcgcactcgcctacaaggcgctccttccgagtacgtcccaccctacgcccgccatcccacgctccgccccaacgtgagtggcgcactaagcctggcctggctgacggatgagcttgcctctcgcccttgtttcagtgccgcttgccgtggtcatcatcggccgcgacgtcgcacttgcgctcggcgctttctaccttcgcttccgaacgctccagcccccggtacgatctcaacggtgtcgctcaagcaagaatagatcattgccctaaccccttttcccccctgcatgatcgcccgcccgcagcgcaccttctcgcgctactgggacatctcgcgcccctcgatctcgatccacccgacgaccttctccaagatcaacaccgcccttcaaattgtccttatgacggccctgaccatctcgcccctcttgccggcggcggccgcgccttggctcgaggcgggcatgtggctcgtcggcgcgacgacggccgggagcgggctcagctacctctgggtcaagggcgcgatccggcgggtgccgatgaaatgagcaaggcatcgttcatcgtgctcgacgggcgtaatggggactgcctcgttcgcctaaggaggtcgtctagaccgctcgccaaggctagacgctacggcaaagagatacggcgccggcctgcctcgcctgacacacacgttcctgccgccctggcgatagactcacccgcatcttactctgacgaagcggcgacctcgtaaaggtaggcgccgagaagctgcgtctgtgcgggcagaagaaagtggcggcggtcagccgaagagatgacgagtcctgaagggctgggagagacgtacgccgcggatgtagttgtcggtgtcgagcttctcgttgatctgaatgtgacgatcagggaagacgaattggccgagatcaaacaggtgagtaactaggccagagcagggcacggccgcaagctgggccgtgtcagcaagaggtgaacggaccgagtgcgcgccgtcgtcgccgcggcccatcggcagaagcaggacgttgacgccgagcgcgtcggcaaacgacagggtgacggggattgagccgcctgaatgagccgtcgccaaggcgtcagcatcgctctaactcgcgagtcgtcaaggggcggcgcaggtcgagggaagggagcacgcaccctcgcgcgtgaggtctggctcctgaccgtaaacctgctgagtagctgttggtccgggtcgcgtcgaaagaaaggcggctctaaagtcagtcttcctagcgtgaccgaagagcaacaggaaaagaagcggagtcggcacgcaccctttgccgcggcccggtagttccagtgctcggggtcctcgacccacggcttgccgtcgtgcacgcactcgatctcgtactgcagaggagaccagcgcgcgtcaggagtcaggcaatgtaggaagccggagggcgactagatgctgaccttgttcttcgagccaagcttggagaactcggagtcgacgtgcgccttgacgagcttggtgatctgctcggctgttaagcaaaaggagaaagtatgggtcaagaacgtcagattggcacgggtcacgagatatcacggcaggacgtacgaagcatgttggggacgagacggattgagaacttgcctgtcggtgccagtaactgcatcagcacagactgcgaggcgctcaagcgagctgttacgggtgacgccgagacccaccgatgacggtggcagggatgacagtcttcgctcctgccgagtagaaggcgccctcgacgccgtggatgctcaggctgggctcgcgcatcttgcccatgagcgcgaccgtcttgtcgtcagacaggcacgtctggctgccggttgaggcgtgaatatcggacagcgaaaagttgatggcctcgtaccgcttgcgctcggcgtcggtcagcggggcaaccgtgtccttgaggccgggaataaggatctcgccggagggggcgacgagcgtcgaaaggaccttgacgaggtcggtcactgaggcagaatcgtcaagttctgtcaggatggagtagtcagggtgagagagcacgagaagagaaggacggactcggctcgtggaccacgttgccaaagacgcccgagtgcaggtcacgggccgggccggcgatcttgaacgtgtagtaggcaataccgcgcaggccgtacgtcaggcagggcgtcgtcgtgttgagccagtagttgtcgctacagtcacgccgagcatagtcgtcaggaccagagcaagagccagagccaagcttcggagagccagacgagtgtgtgagacgtacgagatgcagacggcgtcgacgtccttaaagtaggcgcccttctggcgctcgatcaggtcgtcgaggccctcgcttccgctctcctccatgccctcaaagcacatcttgaggttgacgggcagctccttgccaagcgcgacgtgggccgagatgacgttgagccagccgagaagcgggcccttgtcgtcggacgctcctcggccgaggagtgcgccgttgccggtcggcgaaggcgtcaagacgaacgggtcggtgtcccagccgtccgacttgagggcgggctggacgtctatgacggaaagtccgataatcagacataggcgctggatattcaaggcggccgctgccagccgaggtacgtaccgtagtgacctgcgggtcacgaggaggatgaggatggtcagcggcgcacagtcagccagtcgaggctcgccccaatcagcgcgacagagcgtgacgcaccgtagacgaggaccgtcttcttcttcgggtcggagcctgagaaaacgaggtcagccccgatctgacgagcgtcgtagagttagagatggaagccgcaccgtacgtagcgaggacggccggcggcaggtcgagctcctggccctcgagcgtctgcttgccgagctcctcacgctggatgtctgtcgcgccgagcgtcttgagctcggcaatgagaaagtcggccatctcgacgacgtgcttccggtacgaagcctcgcccgagacggactggacgagcaggcgggaggcgaggtcagtcacgaggggtcagcccatgagcgtcggcggagatgcctttcggcgaggaccgactgggatggcaaccgcctttgagaggcgctcaatgagctccttctcgtgctgagtgatgtagtcaaggaaatcctgcggtgccgacatggtgtacagctgctgtttgaggagaagaaagatgagaaggtggtgatgggtgtcaaggaggctttgaccaagacggcaaccctttggcaaccgggctgagaaggaggccacgcgtggcaccgccagaccgcgtcctgctgcgcctcttgaccgtcaacttgccctgagacggcctcatcgcaagtcgtcctgccgtcgcagtagtgagcggagccggacgcgtcaggcggtctctcgtctgcttcggtcccggtgtcactgctgatcctgctgctgtcccacccaatgggcgacccgaccgtgtcgcagctggatccgtcctcagccgcacgcccgcaaccaacggccaggtcatcgtcgtcgaccttccgcccgaagtgaagtggtgtaagcagggcgtcgaacgtagtgcggtgctagcaccccgcggccgagcagcagcagcggcaggaattaagtgagcatcgggcgaccgacggcgaagccgcaccctcgaccctgacccttgcccgcttaactcgtccagccttcagctcaagtcgagaccaagaaggacgagctcattgtcgccggctcggaatcgcacgagctaagtacttcccagacatgcgctgccgaggagaccttaggcctgacagagggaggacgctcatctctcgtcgatcatcaggtcttcgaccgcaacatgaacgacgtttgtgtctagacttaacgacggcagcctgaccaggtgcgcgacggcctggaggacgccccgattatcgttgatgtacgtcctgaagaggctctgcgagggcggaggccctcggctaaccaatctctcctcctcaacaacgctcctgacgccagcgggcggcaccaacacccgaccagagacatgattgccagcgtctcaggccagaaggctgtgatgtgcgttcggcgtgaggaccggatggacgaggtccgtcgccgacgccatacccttcgcctgtcagggccggacaagtagagctgactgtgacctcttccgtttcgcacaaaggagggcgacggtgcggctctgcgtcgctagcgcaaatcgacatcctgtcaaggacgccgccgaggacggcgctcgcactccctttgcgttggccgccagcaaggcgagtaccggactagagtgcggctggtggtgggagactgagggcggcggagatgacaagactggctggcacctccggattaagctcgactacaacggccgtttctgacgcgactagaatggctttagattggaactcgcgcatctttggaatcatctttttatgacaaggggagcagagtgtgcaccggcacgagaggcagggtttagtaatgggatgttcagacgacgtgcgtctccttggtcgcgtttgccgggacgtcgtcgtcgcgcaggacggtcccctcgaggttggagaggtggacggcgatggtcgaccgagcgcggaggcgggcgccgactgcgtacacgagagctgggtgtcagctgggagtccaaagagcagcgcacgcgcaagcacgcacaaatgatgaggacgaagggcacgacggcgactgcgaagggcggaggatcagctcagacctcagcacgggccggtttcaaccaggaagacgcacaggcgctggcgatggctccgacgacggtcgaagcgataggatacgtgaggtgctcgtactgtgcaaaggggtgacggcgaggtcagcgtgacgggcggccaaggggaagaggcgctgccgcttggaccgaccatgacgatgccgaagactaacaagagaaatgcaaacgaagtcagtgatggacgaggagacagtgaagaaggccgagtcaatggcgcacaagggaagacggcgccgaggatgttgcgcaggagactgtcatgcggccggcgggcgggtgtcagccttcggacctcaagtcacgtagcagcgcctgacgcgcacctctgagcagcttgtgcagaagacgagtaaagattataaatatcgccgaggaaattgtaagtggccaaatagattgagactacggcgtcggccagtcagcgtgaggttcgcgactcaagcgacaagaggtgactgaggtcgtgacgcacagatgccaaactgggccagggagatgaagatgcagggcacgatccagtggatccagggcctcgcggtccatccaaagcctgtagtaaggcatgcttagcagtcagcgaccgatcgagacgaagagcagacagaagtgacaaagcacgtacagaagcagccaacggcaaagcagatcccgccgatcgcggatgtgtacaagcgaacctcgggcacagcgacgccctgaccgcgggcgacggcattgcggtaccagcgctcctgaacaaagaagttccagagccagccgaaggcggcgccgataaagccggtgatgagtacggtgccgccctggtcgaccggtccagcgcgtgagcttctcgagtctcacgaggcagactaaaagcttgacaggcgcacctcgccgctgttgaagccataggtctgctggaagacgtgcgagatggtgccaacaaaaaggaagacctgagtgagacgcagacagaacgcgagagtcagcttgggagtcgcccgacgaagaccggccgcaagtagtacgcaccatgccccacgcgaagccaacgtaaagggctaaaggcgacgcaatgtcgagtgggataaggaccaccggttagccatcggtggcgggcgaggctgcgacatcggtgggagaagaacgcaccaagaacggcgacgatcggctcgcagaaaaggaaggtcagcggcctcgcgcacgaaatcttcagcgcctcaatccagctctcgtgctggtcgacgccgaggacgtagtgcgggcggccggtctccctggccaggcgctgggcgcgcttgtgcaggatgacgtcgccacgactggcagtcgtcgagcagaggacgtcagcagtcgtccaccaccatccatggcaggctcgggaagagagccgcacgtctcagggaagccaatctaccgtacgacatcagagggagctagtcagcaagtgcggacccacctttgcaaagtcgagagacctcacgaagcagaggacgaagcagagaaaacccgacgccatttgtacccagtaaacccactggcgatcgcggagcggagtcagtcagcaacggcagaacgagacagcgtcactacgagcgagaaccgagcgcgagactgacgtgccagttgagcttgaaggcgatccaggcggcgcatagcggaccggtcgcattcgcgcagaaaactgtgagtacaaaggtgcccatggccggaccgcgcacgcgcttggggaagagatcggcaacgacgcccgctgaggatatcggaacaacatgaagtcagtcgctgcggggctacggcgccggttagagcagtcgacggctcgcacctgcgacggggccctgcgagataagcatgaggtgatgtcagccgctgcgagctgcgccggctcagaaacggcctcgcacctcgatgcaggccattgttccctggaagaaacgggtcaagatgatgctgacgacgttgggcgccagggcttgggggaggaagagcagggcgatgctgcgcacggcagagccagccgaaaacggcccgtcagacgaggctgctcagcgcactcagcgtgactcgagaacacgcacaggaaggtgagaatgacgagcataggtcgacgtccgtaggtctctgcggcaagggggtgaacgcccaggtcaaaggatgcgcaaggctgcgcaaggctgcgcaaggctgcgcaaggctgcgcaaggctgcgcaaagacgggcaagagagcacgcaccagagactggggccaagacaagaggaccgatgcccagcatgacgaggtaggtaaaggatgacgtctggaagacctcggatgagacacctgggtggtccttgcggaagccggcgctgacggcaccattggcctgcagacgaagtgggtcaggcgagagcgcgagagcgagggatgtctgtagtcgggctgaagacggacagtagcgttgactgcaaaagacgtgcagggcgtgagcaatggccgtgaaggtcgacgttggcaggaatgtgacgtacaggcggacgtgtaggtaacgaacagagcgacgaagagaactggatgtgaagcaggcgagggtcagcgctgcaggcccgacgtgaacgacagcatcccaaggctcacctcgccagcgcttgaagttcgaccacccttcctgcgggttctcgggatcgttcggcgggaagtagactccgaccgtctcctgacccgcgaactcagtcttatcgacgccaggagcaacccgaatgtccgagatttcggcgggctgagggtacatgctgctctgtagaggggaaaggcggcgcgtctggcagagaggtgaggcagaggctaaaggagccagcggaagcgaccggtgtggatcgagctgccgacaagtagagctgaaagaggagagggctgcagtcgggagagagtcaggcggtgaggtcgaccgttccattcaagaggagctggctgctctttcagctccttgtcagccctctgcccctctcctgccggcgtcggccaccgcctaccccgctctgacccgaggcagaaggagggatgaggccgcaaagttgcccaatcgagcgggtcggtatcgcagagaggtcggcaagaagggcggtcgtgagcggggcaggcagttaagaatagcgtgagtgaggggcgacccgtcagctctcgtcgggccggccggcgctcctgccgacgagcaccggcagctccacgggctctccgccgacgcccgaccgacgtccgaggagacccgctccagaagaggagacggacatggtccgtacgggctggtgcgtgcgagttgggccaaggaggggatggtggtctggggaagccgacgggctcgtcccaaattgtcgccagccacgcgagtatgcaaggccgtgcaatccgtctctctcgccctgatccttgcacagctctcgccagtcccctttggagagacgcctgtcccacggcatgattctatttgcaagccagcgcaatcatgtccgacctaaggtggcgcttgcgggctgcgtcaaggggggccgacgcgcagggatgtgggaaccttcactttctctcgcggcgcgtcaagcagctctgacggtcggctcagccaaccgaacacttacggcgttttgagctggaacgtgcgcggagacaccctctcaatcctccgccttccctcctttctccgcctcctataacacagactgacaggcggccttttgcggataggaagagcatgagggcgtgacaacgatcaaacgggtgacctcccatggactcctcgctcacctacacccaagctaccgaaactcaaatctcgctcaccgtgtggactcctttttacgatcctcctcgacctcgtccgtttggagttgcaacgagcgcggcgcgaggcgcagagggagcggcagcaagttggcgctgtgtaacccctcgatcctgcggtcttggatttcatcgacccataaatgtgttgatgtgatgaaaagggtgcgtcgtggcggtttggcgggcggtcgcccggcgccgacgcgcccccgtccaccagtgccctctccccttacgtgatgcttccatggtctgtaacccctccgtaacctttcgctaggcaaaattccctcgaatgattttgtatggcgaaaagttcacgcgccttttccatttagatcatcattacacctagtttacaaccttcctcccgcccgcgtcctttccacctctcgcgccaaagaacgtctaatcatgtcaagcgttcacccggcagctgctcgagcagctgctcggtatgcgcatggtcaaggggaccaacgtccgcgagcagatgacgccttcctcaccaagatcaacgccatccgccgggtcgtcggggagctcaaggaccttgacctgctcttcggctaccagctcctccgcacgctgccggttacgctcgcggctgagatgctcaagtcatccatccggatccaggtcggcaaggacgcccagctcctggccgcgacgaccagccggctctccgccgccaacggctttaaccaggtccactgtcatgcgccttgttgagcgaaggacgaaacgaaacgagctaccttagtcaccaagaagtggactctacatgagatactctaggcacctgttgagcgaaggacgaaacggagtgagctacctagagtgaggctcaggacgtgttacaagcagtgagcaaaaagacgaaggtgggactgaccccagtcaccaagaattggactaaggtctctacgggggggaagggaaaaagctgagagggagagagaacagatgaggaaattgtaggacgaggcagggggtagggccgactacagtgggtgtgagctactgcctaggctaaggggggctagactagggggggcgaaggtacctcattctcaggactactccgtgaacgactgaggtttaggagggggagcgagcggtcgtctagctaagaggagggagcgaaaagagagaggaggaaagagtccggcggactccagggcgtggcgcccgggtgcccttcccccctctctccccctcccttttcccttgcccgtctcaagccgcaggcctctccatcttgcgcttttttagtttttttggcttcgcgcattcgcaccccttcttcctatcgcccaccctacaaaagcgagatcccatgatccccctccgaaaccaaatcaacagggcgcgcggtgacggcgtcggagaagagtgaggggtgcgcaacaggaagtgccgcctcgtcgagctcacttttcgtcaaaagtcttgtgcttgtccactgcataagcctgtcctcgggcagctctgcttcatcagagtgcgtggagcggctcgagctgccgtggtttggtgcggcggtcagccaacgagcgagcgagcgagcagcaaaaacgggcgccgcgcgcgctgagcgagagctccgactgacgaggtcgtctccccctcctttgacctctctcctcctccctcgcaccatcgaccgtcgccgcctctcctaccctcctactctactagggatgtcgtcgaccatagtatcgcaggcgtcgccgccagcaacgttggcgccgctcgcctcgacctcgtcggccgcagcgtcgttctcctccgcctcggccgcccctccaccgccgccgtcattcctctcgacctcggttctctcgcccgcagaaccctcctcatcctcctcatcctcatcatcgaccgtcaagcctgcatcaggcagcagccgaccgaaagcgtcgtacccgcctccgcctccgccatggtactttgcgccgaggcggccggtcgacccggcaacggccccggtcctgacggtccatccccgagtcaagacggtcggcggcggcatgcccgagaagttctggcggggcgtgcgcgagtgggcggacccgtcggcggcagcagcagaggcaggagcggcggccaaggcgagcagcaggagaaagggcaaggcacccgcgacggcagacgagccggccctcgagccggcaggacggaaaagtaacggcaacggtcgcccgacggtcgatggctcggcgacgacggcgacggcatcgaagacgacggtgacacctgcctcgggcgagagcgaggccttacggatagcagccgagagcgcgtcaccgacgtcggagcgagcatctccaccctcgacctcggcgagcgaggtaaagccatcgtcggcagcacctgcactggcatcggccgctcctccgaccgcctcgaccgctccttcccagaccacgcctcctatcaccatgccggctgactcggccgaccccatcccgacggcctctgctcccgcatcgcccgtcgtcagatccgccacaccggtcactgaggcacccaaggcagcgaccgcaccggcgccggcagcgcccaagccggtcgccaagtcgtgggctgcgcttctccgctcgtcggctgctccctcttcttcgacgccggcagcctcagcgacgtgtactgggccgtcgggcgccaagtcgtcggccgctccatcgtcctcgaccgtcaatggtgcggcctccgcggccggcgtcaacggtcggacgtccaagtcgtcgctcgtccagcttctcacagccggcccggctgagggcgagctctggtctggctggcagcgagcggcagctgggggctcgagtgcctccggccggcgtgtcggtgcacgcgggctcgtcaaccgtggcaacctctgcttcgtcaactcggtgcgatcgccagcgctactttgatgccagactacaatgcacgactgacatttgcattctctcgagcagatcctccaagtgctcgtcttcacgcacgagttctacaatctatttggcctgctaggcgagctgctgccggctgacattgccggcgagtttccgctgctcgaggccatgtgcgtcccgccttcagcatccagctcaagaggttgctttgtgctgactagtcctttgctccgctcaggatcatgttcctgcgcgagttcccgccggcggcctcggtcgtccagttgggccaggccgcccagtacccctcgctcaacggcagccacggcgcagccaccaacggcacgacgacgccgtctgcttcgtctgtcgccggcggggacggacccggagccgatgcctttgtgcccgagcaggtctacacggccatggcctcgatcgcgcgcttcgacttcatgcgccagggccaccaggaggatgccgaggagttcctcggcttcttcctcaacacgttgcacgaggaggccctcgtcctgctcggccgccagccgaaggacgtccgcgacgccgtcctaggcaaggtcgacgacctgaccaagcccgaggccgcggccgagtcggcggcaaccgagcagcagagcggcgacggctgggtcgaggttggcaagaagggcaagggctcgctcctccgtcagagcggcgagcaggcgccgacagcgctcacgcggctcttcaccggctcgaatcggtcgacggtgacgatcccgactcacccggccgtcaagccgagcatctcgatcgagcccttctcgccgcttcagctcgacatccagccggcgcacgtcaactcggtagagagtgcgctcgcccacatggccgatccagagctcatcccgggttacgcgctctcctcgctccggggcggcatcgccgacgccgtgcggcggaccgagctcgaggtcctgcccaagatcctcgtctgccacctcaagcgcttcaactgggccgagggcgcccgcaaaatggccaaagtcattgcatttggcgagacgctcgagatcccgcgcgaggccatcgctgcctcgcgccggacggcgaccaacccgaagtacaagctgttcggaggttcgtctcttctgcacaccgctcctcattcgattctgctcgctgacggtctgctatctgcgtctcctcagtcgtctaccaccacggcccgaccgtctcgtcaggccactacacgtcggcagtactctcgcgttcgcagacggccggatcggtcaccggtgatgccgatcagtggctccacatcgacgacgagctggtgacgccagtcaacgtcggcgaagtctgcatcacggccgagcaggcccgggccggtgtcagcggcgacattggcagccgcgagcgctgcgcctacctcatcttctacgagcgagtcgagtagattggcggccatgtccgctggtgtgtgtgtgtgttgagggggggggggggctgctggacggcggctagcccgaggacgggcggctggtgcggaccactcgcgaggtcacagagggtcggaggcctctccctaatactcaaaagcacgggcacagtctgcaaaccgtcggacatgcagcggcccccttcatctcatctacctagagagccaagtaccgcgcctggcggtcgataccccctcgcagctgcctccttaaacaatacgttactctgcgcacacggctcttgctcaactgtttatgcgatcgtcgcagctgctctcgcacctttgtttgccaggtagccgcaggcgaaggacttggccctcgctcgacgcagcatcttcagccagacccgccaggtcactgcgcgcttcctccgaccacgaccctctcgacctctcgactcgatgacaaaggccgacgccacccagcttccgcacgagctcgtcgcttcactcgtgctagtagctcatgccgcgctgcctccatcattccagccagcaccgacaccgaccgggccgacctggacaccgctcgcgggcgttgttctcctcccgccgcccgcctccagctcagtcgcaggcacccctccgaccctcaatgccaccgtcatctcgctcggaacggggtccaaggtccttcctgaggcacgcaagagcgtctgtggcgatctcgtcgtcgatatgcacgccgagacgcttgcaatccggggcgcccgccgctggctggccgacgagctcgtccgctgcgccggcgccgccgacagcccatactgctggctggagccgcctaccgagggcgagccatcttcgcccgtccgctggcggctgaaagctggcgtcgaagtctggctgtacgcgagtgacatcccctgtacgtctcaggtctgtcggatctcctccggtcgctgacccgctcttggcctcaaccttgcccctttgcgcaactcccaggcggcgaagcctcgacagcgtacttggcccgccaacagctcctccacgacccagcgatggctgccctccagatatcggcctctacagctgcaccttctccagacttggtcgagatagccgccgctgccgctgcaggccccctccgaggccgagcaggctacccccgggcacgcacgcttcggacaaagcctggccggccggacgcgcccgtcgcttactcgctctcgtgctcggacaagatcgctcgatacggcgctctcggcatccagggcgcgttgctggccgacctgctcgagccagtctggctgtcgggcgtcgtccttggcccggtcgacgctgccgaggatcgcaaggcgctgaaggcggaagtcgccgaggccctgtctggtcgcgtcgtacgagagctcgaggatgaaggcatcaagggtaaatgagcacatgcggtgctccgacccagacgcctcgtccgcggcatccgttgatccagttcatcgctcccctttgcagcgtctctgcccaaggcctttgcaacgccgcacccggtcgaggtctatgtctcggccagcttgttcacgcattcgcgccttgcgcttccgataacacctgctccagtaccctcgcctttctgtcagtctcatatgtctccggtccgacgccgggatcagtcctccgcacagttgcagccgttgaaactcaccttaaccctcaatcgttcgcttcatctcccaggcacgctttggttcgccggcatcctcaagccagagaagcttgcagccggcggctttcggctgggtgcggccaaacgcaagggaggtgcgactctggcgccctctgggaggagcgccgtatgcaagctcgcctgggcggccagactcgctagcgtcagggtggccctcggccacgatacgccgtgagtccatcctccgttgcgaccgctcagctcgtgcccaaggactgacctttgggttggtgtctgatcgaccaggcccgcagaggtgacctatcacgccttgaaggcttcgcctctgtcaaccaataccgggtatctttcctccgccgacgaagcagtcgagcccgacaaaaagcgaccgcgacttggtccctcggacgacagccctcacccgctggccggcgctcacgaggggaccgccgcctaccagatcgccaagcaggccttccgacgaccgggcgcgctttttgacggctggcacgcggccgatgcgcgttgggaggcttttacggtgccggctgcggctaattcgcagcgaccatgattttgacaatcagcggcaggaaggagtggcagcatgggtgggacttctagcaggaggaaaggtggccagcgggttgcttgctaattgcccgccccggaagaaagccttgcgggactgaaggtgcaaaaaagcaccacccccctccccgaagggaggtcgatggctggctaaatattgcggggcggtaatagagtaatctacaacccagctgaccgctgaaggaagggaagtatcgccgtgctatgcccaagcagtcagccggatgaatcggtttgtgaagcgattcaccactccaaggtaagtatgaaaagaagggcctccagcggcgctcaagcaggtgcaattccgcggaaaccaggcgaacggcagctcctgatcgacagcggccattgacagcccagcggtcgaccgccgtaggccgccctgccccgacgagcgacattaagccatgatgagactatcgggaagaagagatccctggctcgccctgtctaccagcggcggcgtatcacactctcggtgaggcaagctctgagctggttcaggagcaggcattcgcgctgcgcgcgcgctccgagccttcacaggcaggccttgctgtggcgaccgcgaaagttgaagctcttctcaaattgatattaacagtctcagcttcctaaaggtgtcaattgtatgctcccagttagctcgacagttgaatattgaagatgaagaagggacagggacgatctcacggcgcgaaactccgcgcctttcccctccgccgcgacggcctcctcgttcagccgttgcctcccccctgttcagtcttccgaccgacgacgacgacgacgacgattaggctctcccctgtcgcctgctcgccgattctcgcacgcttcgttggaccagctcattacaagcctcagcccagccgctcgtcacccaccaactccgccgcctcctggccgacctcagctcggctctctcgaccctcttcgcgtaccgtcgctcgtcggccatgctgccccgtagactcgccgccgcccagggtacgttcaccctgcctgagacgtctgaaggttgcgtaagacgccaaagctgacccgctagagctttctgctggccatcattgccttcaggctcccgcctcccacttgccagcgtgctccaatgcagccaacccgtcagtcgcccgacctaccaccgagcgatcgggcacaaggcacagggcgcacaactgatctctttggtcgtcacgtctgcaggttcttggactccggcattcatccgatctgccggccgctgagaccaccgcgtctgttggctcggcgcactcggcgtttctcccgtcgatcaagctcgcgcctttcccctacatggcccggaagcgggtcgagatggacaagggcattctcccgccgctcaagccgtttgtccatccgacttcgagcctgtcaatcacagagtggaacgaacgcctgcgggcgctgattcgggacggcgcctcggaggaggcgatcaacgacgtggtcagccgcatgcaccgcctgcatgtccgcatgaacgagacgacggtcgagctcctcgtccgcaacgtcaactatcatgcaccggacggccttgccgctggcgagcccgtggtcgagagcgaagagacgcttcccaagctcggtgctgagctgtatgacctgcccgcgagcgacctcccgcggtcgtttgagggcgcgacgacggcgatccggacccggcagcgcaagatcgacgccatcaaggcaagcttcaagaagctccagcagtcttacatcgacatctcgagctcgctcgccgcctacgcgaagagcaacccgccgacgcggccaaactacttcgccgcgcccttccccgagctcgaggccttccagggagagctccgccggcactatgatcactgggacacgctcgtgccccagtacgaggcggcggttgtcgaaaaggctcaccttgccaagcagtgggagatcgacctcgcggccaaggagcgcaagctgaagcagggccctgacgacaaggcgctcgccgctcaggtcaaggaggcggccgatgcaatggtcgaggcccgtcaacagcaggcgaccgcaaagcagcatgcgaaggacgccgttgcgttccgcgacaacttcaagcgcgacaagctagagcagctgccccagtttctcgagattgccgactacccgaccccgagcctgtcgtcattcgtccgcgcttacaagaagcgggtcgccaacctcccggccgacaaccggccgctctggcgtgtccgactcaagaaggaccaggaccgccttcgcaagctcgtcgccgaagagcgtacgctcgccgaatcgagcgcagtgatcgaagacgaggaagatgcgatccacgacatccgcgtctcgaccgacctctcccgcgtcgactacgaggccctcgcgccggccggccggacagagtttgagctcatgcggacggcccagcaggcccggaacaacgcactcgagcgcgagcaggccgagatcgccaggctggccgacgacctgccggcccaacaggcgcatgctagccatgtgctcgaccgcctgactgccatcgaggagcagacgatcaacgagctgccggtcggcgcgtggagctcggcatctcggcgctttgctgccgctgctcaccccgcccaaggccggtcgctcgaggctgactcgctcgtcacctttgtcgcaacctacgagctctaccgcgcctggctcgcccggcacggctcgagccgaacggggaccgacgtctcgatcgtcacgctcgaggcgctcgccaacgttgtccggcttgcaccggcgtactcgccagcggtccggatcgccaacgagatggctgatcggctcatgaccgtccagggtggcgccggcgttcgcgctgtccgcgagaacgtcaagcacctgacggtctcgacgccggccgactttgagccgctcttgccgctcaaggtccggcacgagccgattcaccgcctgctcaatgctctcgcgaccatcgtcggcgacgcccgtccggcgtcaggcgtcgtcgacgccgcgacgatcggtcacatggaggccgtcagcgagatgttgtgcgcccacctcagcggtctcgagaagggcctgttcaacctcgaggactacgccgagcactcgcagcccaaaaaggttgagggcgcggtcatgcgttcgacggtcgaaaggctccagaaggcctacgagggccagaccgtgacactccgccgcagctgagatgcatgccatcaaacgaagtccaaggagagaaacatgagcagaggacagaagattgctatgcgaggcaagcccgcctgacaagatggcgggatgcagatggtacaagatggttgggagtcggttccctgctgactcggcgagcgcggccgaaaatgttctggaggatgtggagagctctagtgcacggccatcctgcgatgatgcggagccgggagatcgagcaaaggatctaggtatgagcggcgttgccagccgagacggtgatccgtcttcccgtgaagggcagcccgacaaaggagggcaaagcccagacgaatctcttgctcactcctcatcaccggtcggccttttcggtggtggcgcctcgggcaccggcgtctttctcctggcgccatgaatgtagtcctggaggatcaggcacgtcaaggaaagtcagcggcaggtaagggcagggaaataatgtaggcgacccaccatctcgcccgagtcgcgatccggagaggtgaggcgcgcaaactcgaggtaaagcctgtacgctgcggatcgagaaaaaaagcagagcgcatcttttgtcagcacacgcacggtgtggtgacgaaacggctcgagaatcaagagaaaccgggcgcaccataaacgacgtgatcatccggccgccacatcgtttcgacccagcactggccattggacgcgatccgccgcgcgacgcggtcgtgagcgccctttgacgagcctggtgatccgcggaagctgtcgatggaggagagcgagagagtcagttgaccatccttagaccggagctgacctcgctgctctcaaacttacaaggccatgatggagggaaggtccgaaaagtcgagctgtagcgtggcatagatgacaggatcagttgctgcatgggtcggcatcttgttggaatcgaggcacgaacgttggccggaacgtaagcaaaccaaggcggcagggaggccatgttccattccgggaagatgccggccttgatgacgaggctggaagtgggttacgacttgtcagcgcatggcactgacgagggtctgctgcacaccggcggaggactgacttctctgccgcgagaagcttcgggaaccgctttgaccacgagtcgccgtcgacgtcgagcacatacttgtagtcgttggtccggtcgacgtcgtccttgggcagcttcgagtagatggcgctgtgaacagaggtaggaagccgaggtcagccccggaattcgtgaaagcaaaggacagcatcgaatggaccgacttgttggccttgcagtcgacggcgccgtctaggaaccgtccaagtggtcagcatacatgtcgctccctctgactcgagcagacaagcgcgcgcaactcaccctcgcagctccagccgccctgcaagtggatgtcaaagtatgcctgggccgcctcgtgctcctcgacctcgagcaccttgcccgtgccgtcgcggttcgacgaagggacgagcagcggctgcctctcggtcgagttgctaacgcccagccgatggagacgcgacttgtggttgacctcccaagcctcggcgctgagcacctcgcgatgagacgtcggcgagcctcgccagtagagcttattcgacttggccgtccagccgcccgcgggctcgagcccgacatcggtccgctgagggacgctcgacagaaccccgaccggcgcgagcggaatgtcggcgctgagcggggttcgggaaagcgagagcataggcagaagccgcgtgtgcggcctcgggagcgacttggccgtccgaggcgtcgtgtagaacgagtgcgtcttgagcagctccggattgacgcacgggtccatcgccttcaggtggtcctcgacaaaggtgatgaggcctgccagcggtcaggattgcgtcagcctggctgcacagcccgcgcaagggggaagtccacgtaccagtctcctgcctcgcagagccggcttcttgacgggccttcgagtcgggcgggcaagcgccaacccagttggcctcagtcaggtcgtcctcgtcaaaagtcttggtgtctaacgagtgggaaggcgagccagcagggtcagcaccgttcctgcgacattgcgtggctgtcttccgccgactcacaggctccgacccgctccgagagtccttcgagctcctctcggcgctcagaaggcaggacgatgccgggctggtcatgaatggagaaagtgatcctgcggcacagacgggagcaggcccagtcagtcgggagctcgctgctgcaggacgccagtagcgcccgaagccaacgaaccgcatgtcctccgtgatccggtcgaggaacggctccatcaagttgatctgagcgtcggctcgtggccgcgtgttccaccacgtgtcgcgtgagtaggcgtcgttccactggagaacgaccttgccacccttggccgccttgccgcccttggccggctggctcgccttgacgatcagggtaaacgtctctggcagcttctcggcctctgccagccgcgactggaggtcctcgtgcgggatcgcgtagaagggtttgaggctcgccatgatcgggtcgtactggaggcggagcgtagacttggcatcagtagaccgagacgggcaacagctcaagttcaagggcgacgacacgcacctcgtctggcagccagatctgcgcgtcctgtgcgaacgaccaccagtcgtcaaagcccttgggcgggttgcgcccgtagcgtttcctgtactcgacaacggcctcctcgagcgaccggctctggcggtcgacaaggtcggcccacttgcgctcgccctcgacgagcaggccgaggatcggatgcgtcgctcgactggcgttttgcgagcccgatgtcgccgggtcaaaggctagcaggcccgactttgcaggcgggtgcgggtccgaggccaacacgaacgccgcctcgcgctcgaccaccgacagctcgctgaggggcgagaggaacacctggtaaaagcggaaggggcgaccatcaacacaggtcagcaagcagtcgcttccaaaaaggcgtcaatgtgagagcggcagccggaagcaatgcttcttggccgctccggccgctggccctcaatcccacaggaggtggccttcgccagctctaacctcggctccgcaccagcttgtcgaccttgacgcgatcagcggccgaccagcaggccgtcccacatcgcccgccagtagcccgagctgagctggccctgccagactgtccacccgaatgtgtttggaaggaagagacggcttctgggcttcagattgaaagcactcacgcagcgtccgtcgctaccgaattcgagccagtcctcgccccgtaaactcgcgtacgtcggtagcggcagctcgggcggcgagacgacggtgaagagaatcaccgacgtcgtcacggccgagagcaggaccagcagtagcagtcggcggggcggcatcctgtcgcgaactggcgaggcggtcggagggaggaggggggcggcaggcggtccttccgaggaggcagacgcgcgcggcggctcgcgcgtaatttccgtctgagcgagcgagctgttgttcggttgtccggtaaggtgatcttgcgggcagagggtctgcttgtagctgtcagaaggtgaagggtgggagaggtcgcgtccgaaccgtcgtctgtggccggcttcgcgtctcgtccgtcctctcctctctccgtctcgcctcgccctctctcgctccccccgcgttagcccgcgcgtctgctgccgcgccgccgccgatcgtctttccacggcctcggccacacatacacacaccgctcttaatttctctcagcgacacgggtctccgaaaacgcctcgcaagcaacagttggcgaggacgggcagcagcagcgctctctcgaaggcgaagaaagggcgcttctgttgctccgccgcaagcttgcgtacgcgttcacactgtcggcctgcgcggctgcagaattgtcagtccctttgaccgctcggccccgcaccacgacgcggccataaaatgcccgcagacgtgcgacgtggcgaccggctgaccgggcagcttctgggccgagatggcgcgcacctcatacatgaacatgcacagacagagatatacatctagggcgcgcactgtcgcccgctttaattgagcgatggcaggacgaccggctcgccgacaaacgatcgcgagtcggacccgacgcgcacggtgagcgcgcctttgggctgaacccagcgctggcgctcgaccgaccaaacggcgaggtccttgttgcgcagccggaagcgagcctggcgcgtctcgcccggccggaggtccttgaccttgtcaaagccgcggaggaggaccggcggctggtcgggctccgagtcggggaaggagaggtactacgggcggtggaaggccgaccctatgtcagtgaagatgagatgtaaccagaaccagcctgctcaggagcgactgacaagctgcacaacctcgctacccgtcaccttgccggtgttggtgacgtcaaccgttgccgtcctgtcacgagggcgagaacaggaggtcagcggcgtccagacctgcgcgagtcactttgctgactcacaggacgtagtcgtagagcgagccctcgccctcaaagatctcgtttgtgcgctgcagggtgcggtcgtccttgtgcgcatcgtgcctgaccttgagcttcccgtattgaaaggaggtgtagcttgcgtagcgggacgagttcagtcagctgagggcggccgttaaggagcacagcagttgaagggccagcctcacctcaggccgaagccaaacgggaatgtcggctcaatcttgtgcgcatcgaaccagcggtaatcgatcaggttgccctcggtaaagcgcacgttgggctcgtcgacaaggtctgacatgatgccgtgcgacggccagtcggcgagccgcttaccgagcgtgaagggcagctgcgggaagagcagtcagtgaaaggcggtcagcagagagtctattttgaaaggcaggaaagtgggagagtcgcaccttggcgctgggattcgagtcgccgaagagcacgtcggcgatcgagttgccctagagacggggcagcacacgaaggactttgtgtcagtactcgctcgtctcatccatgacgttgcccttccatcggctcgacgcacagactcctggcctggcaagagggcgagctgtaagaaatggagaagagcgtcagtcacttgaagtcctcgctaaattctggctaacgactgacaaggacggccgttacattcggatgatggatccaacgctccatcaggaccggtcccggtgcgtgaacgacgaccaccgtgttagcgcagtgagcggcgaccgtctcgatgagccgatcgcctttgttccagaggtgcaggtcctcccggtcaaagccctcgaaagcaaaggccgagacgaagactgggcgagtgaagagagccccagccttcagcagacgttagagacaaagtctgaggacgaacgcaccaaagcactgctcggcgaccgacacggttcgattaatgtgcagataggcgtcgtccgcaaggacaaagtcgacctgcctgcgcgtctcccggccgcgagcagcgatagcttcgagcggcgtgatctgtacgagcgcgtgcacgtcagctggccgaagtcgtttgagacaggcgatttagcacacggacgcacgacgtaaggcgcaaatgcgctgcctgatccgccggccgtcgtgatcgtacctgagcggagaaagagtgcggtcagcctcgagctcagagcgtggctgggcaagtatgggacgacgtacccggccagaagtagtctctgtcggcatcagagcagatgtcgttgtcgccgcaggcctggagaccgagcgtgctcgggccggcgtccgagcctaccacggccagccggcgggtcttgcgcttgatcggcagagcgcgcccaacgttcttcagcagcacggtcgactcggcgccgatccgacggatgagcttgtagtggtcagcctggacgtcgggaacgttgtcctcgacgtccctttcgtcctcagcttgcgcgccaggcccggcgaagatggcttgcaccgggctgtcgggcgccgcgacaaggtcccggggtcggttcgacggcgacttggggaagcccttgtcctgaccgagctcatagaagggggtgaggaccctgtcgacagcagcgctggccgattagcggccgtctcggagaagcgaaccctgagggacgcacctgcgaaccatatcgtcaatgcgcgactcaggcacgacaccagaccggacgaggccgacgagtgtgagcccaaagtcgccgccgggcgtcatgccctggccaggcattctgtgatgtggctcgcaggtcagtaccgacctcgtcaagcactgcgagaaggagggacgcacgtctggtccagcccacccagcgccgagctcatgttggaccaggtcgcgtcccagtcgctgacgaccgccccttggaagttgagctcgcccttgaggagcgtgttcagtaggcgcgtgttctcgcaggcgtgggtgccgttcagcgagctgccgagccaggttgagagtgggtcagctcatggcgcacagcaacgagcatgcaagagcacagacttacttgtacgagcacatgactgatcgcactgtcgatgatcagcgtgatgaagagcgaagagagagagagagcaccgaaggtacgtaccggaccctgccccagcccgaatggcctctgcaaaggacggcaggtaagtctcgtgcatcgttttgtctgccgcccgcaacggaagatgaatcagcgcgcctatctttttacaggtggacagcctcgcactcaccgtcaatctcgcttgagatctgtcggaacgtctggacggcgccgtcgatccgccagcgggcagtacggaaagtctcctgctcgtagccgataaagtgcttcaacgatgtcacgacgcccctcttctggatgccgcggaccgtcagatagcttgtctcggcgcagaggaatgggtcgggcgacggtccctcccaccctcggccgccgagcggcgagcgaccgagcgggccgcccgtgaccggcccgagctggacgtggacgcccctcgcccgaaactcatcgccgagtgcccttgcacgctcgctcatgagctcgcggtcgaatgaggcagcaacagtgacggcggccggaaactgagagacgaacgactcgaagcgtaggccggtcgggccgtcttgaaggcagagcggtggcagaccaagccgtgcgaggccgggcaggttgccctcgcaggggccgctgtggccagtagtgaaggcaaccttctcctcgagtgtcatctgcgcgacgacggccgaggctttggcaaaggactgcaaggcagttgacgggttcagcgatcgaagggggatcgaactcagtccggcagccgagtcgagctcacctcggtccaaaggcctccatcagcgtaggctacagtgcgaggagtaggcggggaggcaggatccttgaggtcagctatctgtgggtatccagtcggacggaggagggcaaagaggtcggggacggatgaacgacggcagggactgacgaccctcgaaggacccgcgcttgatgtccttcgccagccggggatccttggccggcccaccctgcggcgggtctgcctcgacaatgccggcaagcgtgagagcgaacacgagtgctacgaggacggcgagcggggagccgagatggaggcggggcggcgaaagctggcggggtttcgccccaggggcgagagggggtcgagaaggcatcttccggccttgaatccggagatctgttcggtgagggatagcgtacaagcaacgaggatgcagcttatgaactgtccccagctaccaggacaaaacgcacggcagtcccgctgttgcttagaggagaaggagggcggggcttggtgatggtggttgaggaggttcgaggggaggccggcggccatcgccgtttggcgcagcaggcttcgatctctcggtgcagctcagccctcgccgatgcactctctttgcccgaccggtcgtattgaacacgacgaaatagtggagacgaggtcaagcgcatgagattgcgctcagagctgactagacggtcgggtccccgaacggcggcccttcaccgcatgccggctgctaagcgccggtcgaacgagctaacgctcttcgcacaccggtttcggcgtgagatgtggccgagcttgagaaagtgcgctcgataagagagtcctgtccttgaagggacgttgcctcgcttcggcagttgagcccgtagcaggttgaggtgggcttggccgcgtcgcgcctgccttcgctcacacgaggccgaaactgatgactgggccgttctgccggacaaggagttcgagccgaaggcgtcgagccgatgtgtcgcgccctaggcggcgggtgaccggaaccagcggggacaagggtgcccgacccctcagcagttaggccttgtcggtcgccttctgcccagccaggccaggcttcgccgccctcgcagcctccgcttctgccctagacgccaccgtcgcaaacggatcctccctccccatctcggccgacgcgacgtacgtccgtcgcaagtagcggtactttgcgagctgtatgagcgcgagcgtctcgtcccggacatgggctgccagggtgagcttctggtcgatctcgggaagttcaatgaggtgggtgttgcctgtggattgcaggaggaggttgagaagggagagtgagctcttgatgaggcaggttgacaaaaccggacgtgagggctgtggagggggcgacgcacgtcggaagctctcgcgcacacggcgctcgaagccgtaagtcgggtccgggctggaacggatgagtgcgagaggagactgaggtcagcacctttcgggatggcacgtgaaggacacgggctcgcggatgagttgttcggacactggctcgcagcgagatgacagcaggcgagccggcatcgcgcctccctgccttgccctctcgcctccccagccgtccccacaagcgactacgagcgtccagaagccgagaatatacacgtactagtctcggcctaggcggaggagctgacgagcggattgcaaggtggattcgagcacggtgtggacagacgggtcgcaggagagagcgagggtcagctctcgtcatctttcagcccatcaagcagccctcagcgcccgcatcggcctgtcgagagaagccgagagcaaggcaatacctcgccggtcgtagtcgggaacgcacctccttgtagagcccaatagcgcggtggcgtgtgctgctgccgacgctgctgctgctagaggctgctgcacccgccgctgctgctgccgctgctgccgttgggccgagcattgtccttggcgcttgagggtctactacgagtacaaagaagtatttcggcgagaagagacgggcagtgctcaacaggggcgaccagttcttgagggaggaggctggtcgtcgtttggatggttggttagaggagcgacgagagcggccgtcatgccgggacgcgcagcagcacctgaatcttcgcccgctgcacctcagccggggcgaggcacggagaggggtcgtgctcttggtgggggagattttcgacgtcatcttctcactcggcgccggtcgcccgctgcgccgaaccttggcacttttcccactcccaccgcgtcatagctgccgacagctccccagcagagagatgagcatgcatggtgcaagaagatgtaaagatgacaaccgccactccctcctcactttgcttcccagctgacaccacacccgcatcccgcgcccttcgcctgcgggttctcccgcacccggaacgccgagccaatgagctcggtcgtaaagtcaagcgtcgcgcccttgagcatcgcgagcgagaaagggtcgacgacgacggggaggggagccgacagggggtcgagcgagagggtcgagaggaccgagggcggggcggagagaatgctggcgagggtgagaagggaggcagatgtcagctgatcgagagttaagagcgaaagttggcgtgcgtaggcgtattctcgtgtccgagccgacggaaacatcgaagcagagacataagcaggtaagggcaagcagggagggaaggggcacgcactagtcgtcaacctctggccgctgagcgagctcgagcttgtcctgatagccgtggcagccgccgctgtcgacggcgacgcgcaggcagccgtaggccgagccatcagtcagggcacgctcgcgcttggcaatctttgcgagttgctgagaaggcgagcggaggcgggcagggggtcagtgtcgaaattcggggcggaagggtcgggcgacgcaaggcgaacgggaatgtcgacgagctcggccaaacagcgcaacacgcagccagtgcgaccgctaaccgttgaagaggacgcaagcagacgttgtcagacgtaccttccaagcggctggcgcgacaagcatgaaggcctcgtcctcagccacccactccggctcgtcgagtccctcctcctcgttccgcgcccggacggccgccttgtccggaagggcaacaagcggccgttcaatcgcgctgctactgctactgctgccgttggtggcgaggctgccgccgctgctgcttggcggggaagtgttgagggcggaggccgaggacgacgaggacgaacccgggccgaaagccgtcgatgtcgccgatgggccggcgacgttgagggcagagtaggcccgccggctattgctgctgctgctgccgtttggtgctggcgaagacagccgcgatggcctgctgctgctgctgccggcgctgcggccaccgatgcgggtgctcgccactgctgctgctgcggttggccggacgctgaccgcgctacgggtgaccgaggcggtcgtccggacaaggctcgtggacgcagaaatgggccggctgctgagtgctgatgcgaagagcttgcgggcaggctgctggagggcggccatctttgtgtgcgagaggaggaggatgagtgtcgatgggtcggtgggcagtcggctgctgctgctgctggtcgccctggctcggtcgagttacggccgagagtcacgcaatgtaactctgtgcgtgacgcgccgccagctcatcggggccagagcgcgtcttcctctcgcactttcgtccatctctcccatcccctctccccttttcctctcctcatcccgcccgccatgaagctcgcccttgccgctctttcggccgccgcgctcgcccaagctcagcacgccgccgaccccgcgcccgactttgtcccgaccaagctcgaggcgccgctgctcgagcagtttaccgactcgtccgtccctccgcgactccgctcgctggatttcctccatcgactgatcgctctgttattcttccgtgcgcctgagcagctgggaggagcgttggtcgccctcgcatgcgactaagaagtcgcccgtcggctctggcgagaccttttcgtacggtgcgtgtcctttccttccacgatggctaccgcgacaaacgactgccggcgaccgaaggctgacctctgcgtgcttgctcgctcttcctcagtcggcgtctggtccgtcgaggagccgaccgtcttcccgggcttcaagggcgacaagggtctcgtcatgaagtccaaggcggcccaccacgtgcgtcgtccctagcattctttgccacccgcatccgccgaccctccgttattgatctcccttgctgatcccttcccactggcattctgcaggccatctcggctccggtcccggccggactcaaggttgccgagggcaagccgcttgtcgttcagtacgagaccaagctccagaagggcctcgagtgcggcggtgcctacatgaagctcctctcggaggacccggccgagagcggcgaggagttctcggacaaggtgcgcctctccctcccgagctcgactctctcacagctgttgcttcccaggattgtcgggctgacggtcgacttcccctccctctcttgctgccagacgcccttcacgatcatgttcggccccgacaagtgcggcgcgaccaacaaggtccacttcatcttccgccaccggaaccccgtcacaggcgagtacgaggagaagcacctcgaggcgacgccgagccccaagatcactaagacgacggccctctacacgctcatcgtcaagtgagtctcgcgtcgccctctttccgcagccttttcgttcccttgctgaccccgttgctctccgcagcccggacgacacgtttgagatcaagatcaacgacgagtcggtcaagacgggctcgctctcgaactcgtttgccccggccgtctacccgccctcgacgattgccgacccctcgtcgacgaagccggccgactggatcgacgaggccgagattgccgacccgacggcgaccaagccggccgactgggacgagtctgcgcctgcgctcatcactgacgacgaggcctcgatgcccgagggctggctcgtcgacgagcagccgacggtcgccgacccggacgcggtcgtacctgacgagtgggacgatgaggaggacggcgactggctcgctccgtcggtccccaacccgctctgcgaggatgcgcctggctgcggaccctggacggcaccgctcgtcccgaacccggcctaccggggcgtttggacggcgccgcgtgtgcccaacccggcgtactctggcgtctggcagcccgagcagattcccaacccggcgttctttgagcccgggccaatcgcgaccggcctcgacgacatccggtcggtcgggctcgagctctggacgatgagcgacgacatgctctgtgagtcgctcctcgtttcgacgacggctctacccctcactgaggcgttccagatgctgacctcaaactctgctcgcagtcgacaacatctacattggccactcgccctcggacgctgccttgctcgcagccgagacatttcaccccaagctcgcgctcgagcagctgctcgagaaggccgcgctcgaggacgaggaggaggaggaggcggcgcaggtcaaggcgctcactgccggcaaggggctcgttgggcaggttgtcgagagcgttaagggccgcttcgtcgacacggtcgagtgcgtttccgttgctacctggtcttcaaatccgcttgagactgacgccctccccgcctttgcaggacgttcccgcactttgtcgagctcctcaaggaggactggcgctcggccctctcgacttacccgaccttcctcaccaccgtcgctgcctcgatcctcgctctcgtcaccctgttctcgaccgtgcgtctcatttcatcgttctctcttctaaccatccctcgctgacactggacttctctgcctgcagttctttgccctcttcagcgagtcgccgaagccggtcgcccgcgcgcccgtcgccgccgccaagcccgccccggccaagcgcgtcgtcgagggcgtcgagcttgcgcccgtgattctcgaggccgaggtcgtcggcgccaagtcgtcggccgtcgaggtcggcggagacggcggcgagatcaaggttcgcaagacggccaagtgaagggatggagagatacggcgagcagagtgagggagggaggaagacgggtgaaggagatcgagtttgctgcctgtaatccatgcgacctcgccactctcgcagacgtccttcagctcgtcccatgagaggcagacggggcgaatcgcacagggcctggctggctggctgcgcgtctcgttcggcctgcttggccgaagcgcctcgcgccatctcggggccatctctctcgcaccgccctgctgccctccccttcccttgctcccgccgaccacacacacccaaccatccctcatcccgcctcagatacgcacacacacctccttcacagccatgtcggaccagcagcagcagcgccacgtgccctacaattcggagtctgagctcgacacgtacgagcccgcgccgaccggcggcgcccgcggctcgaccggcccgagctacgtccagcagaactcggagagcgagtccgagtttgatggccagcgccagcagcagccgaccatctcgttcggcggcgtccagcaggccggcggcgacgacgccgacgacgacggtcgcggtcgtcgtggcggtggtgcgcctggggtcaccggcttcgccgctcagacgggcacgtacgccgagccgaactcgggcgacgacgaggacacgctcccgccgctcgtcgacgcccgtgctcgctcgcgcaccccgcgcggcaaccggtccaagtcgcgctcgcgctcgcgcgcccgggccgagggcgggctcaggactgaggtgctcatgaatgaggactcggactcgggcctcgagggcgggagcgctgggtcggatgctcaggagcgcgtcggccgggtcgccgctggctacgttccccagaacgagggctcgggtgcgtcccgctctgtcattttaggagcaataaagcagctgctctggctgtctttggttcagcagctgacgctcctccggctggatctccttatctctttactttgcgcgcgcgcgacctgcaccgcccgccagacaccgacggcgagggcaactcgcgtcccgtcgcccgcaagcacatcaacacgtccgggcccggtcagacggctcgttcgcgctcgcgctcgcagaaccgccaggtccgttaccaggctcacatgaactcggagtccgagtcggacgacgtcgtcaccgagtacacgacggcgccggccgccaaggagttccagcggctcgaccggatcgacgtccccatgaacagcgagtcggagcgcgacgactgagccaactcaggcttgcgtcgcgccttgcattcgcctgggccaagcgctggaggggaggagacggcaggagagagaggagaaggaggagtcgtcctaagcataacagttgtagtcccgaatccgatgtgttacacaccctgcccgtgtgcgccatctgagctcgccctagagtcccggtctgcaagcttgaagagagtcgaggcatcggcgagaggagcggccatcgtcggccgtcggctcatcctgtgcgtgcccttgttcccgaagccggccgcccaccgcaagccttccagccgaccatcactctcctcgacggcctcccttcgttcttgccgaccccaatgcctctgccagcgtacttaacctgctctcctcctcgcataccgcatcagctttgctcacgccctctgtaccgtcatcctcgtcgctcagcagcccctccggccagctccggcagcccctgaagcgaggactcgcatggcccgtctccgtcgtcctgctcagcctcatctcgtcgatctgcctcccagtcctggcctctccagaaccagggctttatggcccccttccgagtcttcaacactttgagctgcagtacgagctgcaccggccgactggcgagtgcacgctcatcggcgacttgcgagccgtcagctgggccgtcccgaacgcccagcagccagtctcgctcggcgaagccctcgaccagtcggcaaataggctgaagaagcgacacgacctcccaatgatcccaatcgacttcatctcgtttaaggagatcgagctcatccgggacggcgagcgcgggatgtactcggcagtgcgtcgctccccctcgccccgcacagtctccttcagaccgaaccagctaaatcaaactctgacctccagtcgacgtctccgcttgctaggcaacgcgagcgcgaagctcagtcggctctcgtctcgctctttgtcgtgtcggataagggcccgaatcagcttctgccgctgctgctggacgtcgccgagggacgcatgcaagtcaaaggccgcaagccgtcccaggcgtgccggtcctgggtcagctcttcgggcatcggtcgacctgcgaggctgaccgtacagagagatggctcggtgctcgctggcacgagcgacttgcccgaggtgcccgaggggatggagctcattcctctgcgcgtgtcgggctactcgcccaggcgggttaacctcgccttctttggtgacggctgtcagtcctcctgctcgactaatgaaatcctttcgaagctgacgtcgctcgtgtactctccagacacgctcgacgagcgcgacaagttcattgccgacgttcgccgcctggccgatgagatcgtcgatgacggtaccttccagtcgacggcgccgctcttcaacttctgggccgtctttgtcccgtctgccgagtctggcgtcggaattaacggcgtccccaaaaagtgcgttcggacaaagatctgtcggttgagaagaggaggctgactcctcttccctctgtcctggccgccctcaatcagcacccccttcggcctctatcgcgacggccacgagcttcgcggcctgtacgccgcgcatcgcaggcgcgctcgcgtcgcttgccgcgcagtccgcgacggtctcttcaacgacggcggctgcgactacatggcgctcgtgggtaatacagacttgtacggcggccttggcggcgagtttacgatcacgacagcctcgacgctcaacggcgcgctcgtcctccgacacgagattggtcattcgctcatcgacgtcggcgaggagtacgagggaggattcgcttactttggagtcaactcgtcgccaaactttaccgacgttaagtgggcgcactggctgacagaaccagagcgcacgccccgctctgaggacgccgcaactccgcttcaggcctacccctggcacgacttggaggaggccagctggtccacgtcatttgagaccgaaggctctgagcgttatccgcaggcgatgctacgcttctccattgccggcctaacaagcgccgaccagtacgtcgtagcccttgctccgttcgcatctgtcgcccttctcgctaatcgcaacattgcattttcttcgctcgcaggatgatcgtaaagctcgacgacaagatcgtccactggtccatccctcgcgactggcagggctcggtcgacagggcctggatcgaggtgccccagccggtcccgggcggtctgcccgcgggccatcacacgctgtcctttgccctgaacgggagcgcggtcgtcaacgtaccggcccagcgacgagggacagacgacgtcatccggcagatctgctcggtcgaagtgagcgagtacggtcgggacgacgtctttgagcggcaagaggatttcattggcgccttcccgacgtgggttcctctgtcttgcccttcatgtcgcgcgactgacacctcgcgtcgtcgcccgcagtcggtcgctctatggcaccactagctaccggccgaccaatgagcactgcctgatgcggatggtcggcacgcctcgtcagtcccccttcgagcttgtgttccctgtctgcctgctgactctactcgtcgctcttggacggaccattagggctctgctcggtctgccaagagggcctctggaaccagctcgtccgtcggacgggcgtcatcgagggcgtctttgacaacagcaccagctcgctggagatctttggcgtcacgctcatgccgctcgcgcagttccgaaaggaccttgtcgcaggcccctcgcgcgagtcatactcggtcgactggacgtgggcgcccgacacagactcggacagcatcgaccagcctgacctggcaaaccagacgttgctcgaactgccgaaaggcgaggcccacggcctctggtgggccacggtcacgctccatagcgaggaggttcgtcgttgggacaagactagccctaatgcctggtgggccatcaaccgggagaggacggggatctacatctgagccgagagcgatgcattgatcgtcatgccctttgcccgccctctgctctgtctgtccaccgcgcaaaattgtcggcgacgacgtcgacgacgtaagcgatcttcgcagcctcgtctcgctcggcccaagcctcgacatcgccgccccaagatcgaccgacagccagcgcacggacgacctcccagagtgatgactcattcttgaggagatccgattggtctgactcgatgaggattcgatcctgggcgacctgggcaaagagaggtgcgatggtcggtcggggcacctgtgacggccgaggaggatgcaggagtagaggcgagatagagacgtagacgatgagatccttccgctgtagtgcaacagattgtggtcaatcgacgtcggttccggcgggcgaggggagagtgcgacgcacttcaattgtacgccaggcttcccagctcagaccgcagctgtggagcaggaccttgatctctgctggaagcggcgcccagtctttggcccacctctcgagtagccgctcgaccggcgccgagacggcgacagcatgtagcgaaatggaccgcacacgccgctcgtcggcgacgaccctcctgagcacagcgacctgggcgtcgagcaccgccgtctgatgccacaggctcgttaggaagggactaagcgctttgctcctcagacgccggaccttggcgacgtcttcatccccgaagcccgaggcgaatctaccaatggcatcaggatcggccgcgacgtgtgcgcgatacgacggaggaaacggcacgcgggcgttcttgtcgaggccaacctcgccgagctgagcgtgcggccagcgacgcagcctgagctcaagctcttcaagcagaggagcaagcggctttggctctggcaggtagtccaggagctcatccaggatcgcccgctggactaccgatgggtttgaaggaaggaacacggcggcgaagtgctccgccttggagatggcggggtcgaccgcgatcgcgtgtgtcgcccatgggtgatagcctttgacagcgccagtatgggatcagccagctgcagcctgcttcgtcaaggatgagccgtcgcgtaccaaaggcagggacgaccctagctgggtccgactgcgcgagcgcctcgacctcggcttgatcgtcgaccgtggtcgccatcgcaacgatcgacccgaggccgctcttcctcagcacagagattgcacctggcggtcctgtcgaggtcgtcggatgacagtgtgcgtcgtgcactgacggtcagagagtggcgatgggagtcagtggccggccatcggaggtagaggctactgtgaagagaggagctcacagcgaccgacgagctcggcagggggttcttctgagctggagtagtacatcgtcctgcccagtccgaaagtttggggctgtcaagtcgaaaaagcgggtcgatagagcaggggaagcgtagggtgcgactcgggctgaacgtcgaggtcgagcggcggcgtcggccggagacctcgcgcgtcatcgcgtcggcagcaggagtgcagaactcatgcagtgcactgatctgcgcaaggctcgcgttcgatgcagtagagaggacaaacggatggtatagccaggggcgggtgcggaagagagtccattggttgcgatcagagagagggatgctagcccggggaagggtaagagcgccggcccgaagacttttgatgcgaagaggtggcagagcgagcaagaggcaaagagaacagcgcccgactgggcgcaccaaaagaagggtcgaagcaaataaggcggcaatgcacagggagcgggagagggtagcaaagcagtgcggatgcaggagcaggcagacgaagggacatgagcgaaggctctgtcactactcgtcgtagcctagagtcgaagagaagggagagcggagcgggtcagtcggccgtgtacggtaaggaaggaggaatgactagcgcgcaccgttggggttgccctgctgccacttccacaggtcacggcaggcctcctcgagtccgcgcttggcttcgaagccgagctcgcgctgagcgagcgccgggtcggccgtcaggtcgggcacgtcaccgtcgcgccggccgacaatctcgtactgatagtcgacgcccgaggccttcttcatcgcggcgatgatctggaggaccgagtaggcctggccgcggccgaggttgtaggccttgaattgaccatcggccgtcgagtccgagaagaccttacccgaggcgatgccgtcgagcgcgaggacgtggccctgggcgaggtcgacgacgtgcaggtagtcgcgcacgcaggtgccgtcgctgagcgaaaggaccgggcgcggtcagctgcctcctgtccgcgcaacgtcaaggggtcatccgacaagcgcagtaagagtggatacgcacatggtcgggtagtcgttgccaaagaccttgagtccgggctcagtgtaccggccgacggccatggcagcgagcagcgggatcaagttgaacggcttgcctcgcgggtcctctccgatcttgcccgaggggtgggcgccggcggggctgcgaaggcgattcggaaggaaagcatggtcagcctcaagcaggatgggctctcaaggtgtagagctacgcacttgaagtaccggagcgagacgacgcggagcgccgagtcggcctttgcgaggtcgcggaagaagccctcgcagacagcctttgtccggccgtagacgctctcgggcttgacaatctcggtctcggggatcgggatcgtcttgggcgtgccgtagacggtggctgacgacgagtagacgatctgcttcgtgccatacttggcgcacgactagccgacggcaggaggaaagtcagtagctgcgaccagagatgaatcgacggacggccagcatcgatcggaggagggacgtacggcagccaggttgatggtcgcgaggacgttgttctggtaataagtcagcggcttctcctgcgactcgccgacggccttccaggcctggttgcgagcaaggacagcagcaggaggagcgcgtcagcaagatcggccggcggcagactttaaaccaagggacgaacagcaatgtgcacgagaccccagatgttgccctggccggcgtagcgctcaaagacggcatcgaccgccttggggtcggtcaggtcgccctggacgaggtcgacccggtcggccttgtctctgcaggcgtcaagaaggacagcgcgtacggtcagcgcccgacgtcgacagtccgagcgtaggtagcagagaggacggacccgagctgctcgcgagcaatctcctcgatccgaccaatcgcggccggcttcgagttatggccgttgtcaatgacgacggggaggtagcggccggtgagaaggagctcgagcacgacgtgagagccgatgtagcccgcgccgccggtgacgaggacgatctgtcgaagcgacgaatggcggcgcgacgcgttcaaaggcgaggtaggagagacgacggacgaggtgtcgagcaggagtgaggttggggacgcgagacggggagcgagatcagtcaatactcggctcgagctgatgaagagcggcatgcgagcggtcgccagctgcctacgccgagcgacgaagagcggcgaagcaagcggccagcacagacgagctgggcgcgacgaacgggtagccttccgtcgacggtcgagctcgctagcgcgaagaggtaggccccgacgcgtgctcgacctcggccgaccgttgccggcgcacgcgtccaacatgattccccagcacctttgcgcgcgaagctgggagagcaggcgagaatgacgtaccttcttgtctgagggagcggaaggcatcgttgggggtagcttgacggtgaggtcggtggtcggagaggaggggaggaggaagagtcgggccgggcgagcgtgaatggttaggctgagcgcaggaaagcgagcgattcggccggacgacgacagaggcgatagtgcgagcgcgaaggaagggagagggcgacgcgaggaggagggagacgaggatgctgctgttactggctgatggcggtcggaggcgggccgaaagtcgggttgggcgagagggaatggagggcgcggggcaagcaagaggaagaggaggagggaggtgacggaaagaaggacgagcgacctggcctcctccccccggtctttatacggcctgactttcttttcgggcgctcatgtggatccacctgctcgactgcgcgggcttgctatcgaacgggaatccgtcttatggtccgacgggaatacggcagacgacgacaggtctggcggcgacgcagcaacaacgagacttctggggccccggtctcgtccttggtcgggcgtccgatggcaagccgccaacccaacgcaggtaacagggaggcaaagagacgtcctgagtgcatggaccttaaaaacggaggcgagcgtactccgcgtgcctagtgaacaagttcaggtcgtcatgaaggaggaggagaccagatctcgacttcatgtatggtggtcgttggacggacgaagctcggattttgcatcatttttcagctgttgtctggagggcctctacagtggagggggactacttgccaccggacagaggtcgtagtcaagagcgacgaaggtgttcaagctgggcagaatactctatcgactctcgcctttgttcccctgctggctgcgagctacagtgcgccgcatcgacctcggcatagagtcgtcggcctgcactctcgcctgattctatgatctatcgtcatcctgcttcgctattgacactgcgttgagtcgtcgagcgtcgccgtcggatttatgagcccgagaggggtccagagtagtcggcagacgatcggccgtcgggggcgcgtggtgacgtgaggctgcgagggcgtttgcgttggctgcctgccgccgcgccggccgagaccctccttgcgccttgcccgttcctccagctcgcccagctctctccctctcctcctccctttctgcaacagccagtcagacgcagagtcagcgctgggaccggcttctcaaggaccgcttctcctgtgtcgccagcgtcgagccaacgctcgctgccacctgaaccttctgacgagcgccgccgctcgacggcaaacgccttctccctctccgacgtcgctcgaaggcctcgacccaacgtcggccgacccgaccgcccgccgggcctactctctttctcgccgcagacaaggaacgtctttctcagcgtgagtgctctctggcgagctgttaggcgacgacagaagctcggggtcggtcgaggcaggcacatcggcgtcagctgggtcgactcgacctgaccgagccggccggcgccttcgcgcgaggcacccggcgcctctttgcccttcgctcgacctctctgtcttcagtccacggagctgacatcgcatgcgcgcctcccttctcactgcctcgctcgccgcctggtcgtctgcttcaccttggttgcgccgcccggcagacgacgctcggcgccctctccgccgatcacctcgctctcctgccggcgtgccccttgtcctctggcgaaccatccttccagcctacccggtcagccgaacaagagatttcaagatcgatcagcccttccgccaagccgtcctttcaccgagcgagtgagcgcgccaaatgagccgatcgaggtcgtcgtcgacgacaggaaggtcgtcgggcggctcgtcaggcagctcctcgcgcttcggcgacgaaggtccgtcctctctgccctgcttcttctcatcgcgcggccttgcgtttcgcccttgcattctgcagagctctcgcatggtcagccgtcatgggccgaaagctgacttgatcatgcgctatcttcttagcaacctaccatcataatcagttgattcacccgtcgccgtcgccgtcggcctcccgcaagaactctgacggtacgtcctgctagatctctcgagccagcgacacacggtcagcctgcaagggtgggcctcctccggcacctttgctccgcgccttgatttcctcgcctttgagactggcgctgactcctgcctcctcgaccgctaggttcatcgcacatggtccctggctcgcccggtctcaactctacgcccttcaacttcatgtcgccgatgatccgcagagacagcggatcgtcccactcggacggcggcggcggatcctatgtgacaccgcatgccgaaggacccgagactagtagcggtaacagcggcagtgtcggcggcggcggcggcgcaagtggttcctcctcgacccactcgtcccccgtcagccagccgcctcttccgccgccaggcttccagccgccgatcgccttcaacccggccgcgcagatctttgtccgccagtcgagcgccgctgccggcggtagcagccagagcggaagcgggaaccgcgcgagctcgggcgagaacggccacagcaagagccggatgaagcgcagcggtggcggtggccgagccgatgacgaccggagatcgtccgaccctgcgacgtccaacagtctgtccttcacctctgatggaggtcttttcgtcagagctgacccctctcgtctacttgaactgcaggcaagtcgctaggctcaaccggctcgggctcatctggcggctcgggcagcggcggcattcctgctgccttccggccggctctgatgcgcgctcggtccgagacctcgagctcatcgtcagcctcgtcgacctcggtctcgccgccatcgacgattccagcctcgccctcgacccagatgccgatgcgctacccgccctcaccccagcagcctccatcgaagctgccgctccagcagcatctcaatcaggctggaacgaacagcagcggcagcagcggcggcaacggcaccaaccagacgcgtgacgtcgtccccggtgttgtcgacccgtcttcgtctggctcgggttcgtccggtcccatggcggggcccggtggccttctcgcccaggccagccgagcatccggctcgagtggcggtacttcgggcgggagtggtggatctggtgggagcggtggcggctacacctcaaactcgaacggccagtcgttcaacggccggtcacagacctcgcttgacctcatctcgtcctccgtcttttcggccaacgggttctcaaccccgctgaaccctcccttgcctcagcggtccaactcggaagcttgggactcggtctggccggccacttcgccttacgccgttcctcatctgccggccgtgcccatcattggcacgccgggcggcagcggcagccacggcagctcaacccacagcggctcgtctcgttcgggtgggacgacgacgacgagcggctcaggcggctcaggctcgaaggcatcgagcgggagcagcccctcgctcggctcgtcctcggccagtcatgtgggcggcggcctagggagcccgatgggcttctcgctcgtcatgtcgccctcgacacccttcccgcctagtgcgatgaaggccgctcggacgcctggcggctcgggccctccctctctcggggcgtcgtcgtcgtcttcgtcgacgaccggccaccacaagcggacgccgagcctgagctcaccaagcgcgccgagttctctcagcggcggctcatcgggtctgagcagcgggggtagcagcggcggggcaggacgaggcagcccctttctcggcgtgcacccgacggcaggcctccctgcggccgacttcgacagccccaaggtcaagggccgggcaatcgagctcaacctcactcatcatgccggtggcttgtcgtcacctgccggacacaaaggctcgccgaggctgccagctttcccatcccgttcaaacgcctggtcgccgacgccgtcaccgccagcaacgccaacgtccgagacgacgccgacgaatctcgtaccctctggcacggtgagccctctatcgcagtcgcagcagcaccacgatgtgccgccgcacctcgtagcgccggcagacctcctcaacggcctcagcctggccgacaaggacaagacgccggtcagagccgcctcgacgaagcagtcacgcggccgctcggtctcgccaccgccaccccagcagcagcagcgaccaaaggctgcgcccggcggaccgtacgagaatgcggcggtccaccatccgcgttcgtcgctcgggctcgcgcagtcgagctcgcacccgccgcatctgccaacaggcgccagcggctcgcctcgggcgtcatctcacctggcacccttgacgagtcctcgaccggtcagcgtcggcctccctctagcaggaggtcctcacgacgaggacgacacgattccggcccgatcaaccgcatcatcgccagcaagcccgccatccgaggaccaaaacggaacgctgcctcgctcaccgacggatggtgcgacgaccgacaacgacactctaccagaagacgaggagaccacgacgcctcgcgcagccgaccaaggtgctgcgtcaagccggcttcgaccgctgtcgactacgctgtccttagagcaggatggccgggctggcggagggagccccggtcgcgccgcccgacaatcgctgtcctcgccagagagttcctgcacggatagctcgggctcgccctcgccgccggccgcaagcccggaagcggtctcgcctttctcgcctgaggcggcgtccgaggccgactcggatgcgacattgacgacgctgccaccggcagtcgcctcgccgcctcgggcggcggtcgtcgataacccttacttcccgccgacgaacgccccgccttcgccggtggccgagctgcggtcgggcgaggcctcgccgccgatcgacgccttcgccgacccggccgagcagccgccacagcagcaggacaatcaggcctacctgagcgtcaccgaggacatggacatcgacgacgagggtctgacgacacttgagcgcatcttcctgctcagtaagagcgagttcacgcaccaccggtccgtcctgctcctacccttgctcaccctctcgtgccgaccgctgacagagaccccttcgtgcctcctcgctctgccagcatcttcatctcgcgcgtcattggcgactgggtcgaggacgtcgacccatgcgagaccgtcgaatacgtccttccgctgctcaactcgctcgggaccgacgaggacgagagcgtgcgcgaggcgctcgcgccgagcctccacaagatcctctggtttttctactcgacctgccggctcatcaccgaggacgacgacccgctcgaggcagccgggcaaggtgagggacccaatacgctcaccatcacctcggaaggcatcgacgtcgtgttgcggccgacgctcgaggatgtccagcaggcgccgctcatgggcggcgtccctgccgacctgcaggacccggcgtcaaccggcccgctctctggcggatcgtccgactcggtcctctcaacgccgacatccatgttttccgagtcgtcgtcgtcggtcacgccgaattcgaccgacgcgaccgagtcgacgacgtcggaccacaccgagagcacccaggtctcggcccgcgaccaagagtgctacttcaacacggcttacgacgttgacgacgaaaaggccttccttcagccggtccgaaagcctcggccggtgatcagcgtccagacgttcacgcctctgatcggttcgctcctgatgagccacagctcactcgtctgcgaggccgccaaggcggccatcattggcatcctcgctcgcctgcgcaacatccagctgccgtcgtacgagccctggcccgagcgtcacatcgatgtcggccagtccaagacgtactacgctcagacgggcgtccacatccacgactacattgctttgacgcccgaggagaagaagatcatccaggacgagctcctcaacgccatcgtcgtcggcatggccaagctcgatgaaacgcagtccccttatgaccccgagtatgacgagaaccaatacgtccagggcgacggcagcccgtacggctattttgacggcgaggtcgacaccgatggcgcgccgaccgtcaccaacggctttgacgaggcctttggcgcttatggcgaggatggcgaccagcgcgaaggcaactcgcctgagctcgccaacgtcccagccgtgcctgcagaggaccgccgaccggacgcggcaggggagactggctctgaggagctcgtcgaggatggagaggcaccgcctgagccccaccctgacattgtcgttccccaagtcgcgcccgagccagagacaccggcactgctgtcgccctcgactgccccgggcgacccggcgcttgcacccggcgtcggagaacatccgccctcggacgacgagctcttccccgagaccgactttgactcgccaaatgccccgccggtcgaccaccggagctactcggaggtcgccgcctacgaagaggagaaccctcagcggacggatccgccgcccgagtttgaccagcagtacaccgaggagctctcggtcgaagcctcgcacggccggctcctgtcgatgaacctgatcgcggccgtcgtcgagtgcggcgtgctcgccgaggaggacgtcgcgacccggctctttgtgcccgaggtcgtccgcatgcggttcgacgagtcgtacgccgtccggcgcgaggccgcgcttgccatggccgagcttctcaaggtcgtctctcgggacgtcgtcatggacagcctggtccgttttgtccttcctccgcgccgacgcccccgagccaagactgtgactgacggcacctccctgccttctgcagctcaccttgtttgacgcctttgccgtcgacgagaacccgcacgtccgccaggccgcctgcctcgccctgccggctttgacgcggcacctgcacccatacgagttcaagaaggagcacactctcaaagtcctgccgggcttcttccaggatgagaccaaggagatccagaacacggcgctcgaggtcctcggcgagctcatctacgcctttcacgaggaggacgagggtctgccccgcgagctcatcgactattttctcggcccgccccggcccaagaaggagcctaagggccaggacgggacgctcaatatcttcagcacagcaaagggcctcagccttttgagcggcctcgatgacgaggacgactatcgccagatcgtctgcgccttcaacgtcagtagcagagcgagccatgcttcgatttagcactcaagctgagcgccccccaattcctccccgacacagttcccggcagtcacgcttaccgctggacgtgagggctggccgctcctacgggcctactacctcgagctcgccgatgagccccaggtgcaggtccgacggagcctggccgcgtccctccacgagatggctaagattctcggcgacgagattgcctcggccgacctcgtccccttcttctaccgctgcctcgaggatgagtacgagatccgcgagcggctctgggagaacctgcacgtctttatcggcgcgctcgatcaagggacggcctggccgctcatccacaagatcgggcagctgctgatcgccggccagctgtccaactggcggctgcgcgagcgcctgatgcagtccctgccgagcatggcggagtcgatgatcaccggccagaacggcaagtaccttgtcgtctcgctcctgcgcgagggactcgtcgacaaggtggccgccgtccgcgacgccgcaatcttctcggtctgtccatcacggcagcttgcgtccctacctgcggcgcccgctgactcttcctctcgccccgttctcgtcccagattccttcgctatatgccacgacgcgcaaggttgatgcgcccgagacgcggcacgaggttgacgaggtcatgcgcaagctcgcccacagcccgcagtaccgccagcgccggacgttcgtccgctgcatggagacctttatggacgtcgagtacgaccaagagctcgtgctcgagcgttgcatccctgagctcctccacgtcaacgccgacccggtcgtcgacgtccgtttcgcgctcgcccgctacgtcgtccgcatgtgtggcccaggtgcgttgcaactgccgcctctacacgacgccgagcccgctcctcgcttccggccgaactgactctctttgccctgccttcaacccgtccagacggttactgcccgaacatggagggcgcgccagagggtctcgtcacgatcgtcaacaccctccgcaacgacgagtcgtttgatgttcgccagcgcgtcgccgagctcttcccagacgtcgaggtcgtacgccgttcatcggcggtaccttcggcagccccgtcatcggttccgtcgccccggcctctcgcacggcgaacgtcctcggccagctcagctggatccgcgagttcgatcccgctccacgtcccgctgcgctcgccagggacgccaaccctcgacggcgtcgtcgaagcacccgagagtatccttcagctcgagaacgtcccgtcgccgctccaaagcccaaaggtgatccccggctacgagcttcacggctatgcgttcgaggagtcgacgcctaaggaggaggcgctgaaggcactcggcgagacgcaaggcctcggccttgccgacgatagctcgcccgagggtctcttgacgccaacccctcatgcgagcaacagcggacgaccggcaaccgactactttgccgccacctcgccgtcatcggcctcctagcgtcggcattctgcagcggtttacaccgagcagcgccgcggccaactactccgctccgtcgctccttttcctcttgtccttcccgagtgtctctcgagcacgcatctcactcctcttttagaagttctccctcctcacacacacacttcccgctccgtctctgcactaaaacaacccggcctcctcgcaccccactcgctcacgtcgtccgaggcgaaccttgtcctgtagccctacatcgcagcttccccccgtctcgcctacccttacccctcacgctcacagcctcgtccgttcactcgcagctttgatcgcccctttcccattcctgttgtatcaatcttcctcaagctccggcacctgtaggcagccttcacaaagagtcgaagttgcgatcccgcagcaagcagccgataaactcattcgcgtgctactcgcgtctactctggcccacactccgcggacggtctagagctcgtcgcgctggtgcgtctcaaacggggccgatgaggcctcgggcgaggggtcggcggccttagaagcgctctgtccggcagacccctcagttggcggtgtcggtgccttagcctcctctggctcagcggcggtgccctcggtcgtcgtcgtctcctgcccgtcgtggatggcggccgatgcatcctctgcagccgcagcccgcttcgcagcgagcttagcccgccgggactgatcgcgacgctcctcctcctcccagcgcttctgagccttggtccgctcgtgagcgcgcttgagggccgacgcgtccggggcagcggccgtcgatgacgagggcgaggccgtcgttcccgaagggtgcgggacgaccggcccgcccgagaggaaggtcgcgagggcgtcatatttgagtgcgcctgcgccggaccaaaccaataggcaaaaggcggtcagtatacgggactgcaaagtgcattctgagcggacgcaccctggtagacctcgtactcgtcgaccgacgatccggtcttccaagtcaggagccgggccttgccgggctcgcccgcgtcaaagccgagcgtctccttgatgacggcgtcggcgtcgcggatgtagccgagtgcctgcgacgagaagcgctgcgagagcgccttgtagaggagcgggaccgaggcagcctgtgagacgggacccagtcagctgtctgctcgatgaaactctcgaacgagccgccgagaaaacgcacgatggggtgaatgagcaggacgtggggcttggcagggtcctgcgttggcggttgacggaggcgacaggatcaggtcagcatccagagaagccaagttaaagcagatcgagcaaacgcacctggctgagaaacgtctcgatctgctttcgcgcaacggccggctcgagaccgcccttggccgggaacttgagcttcttgacccggtcggcgacggcatggctcgcgtacgtcgttagcgagcccgcctgccgctcgccagtatagtccctcggcgggatccggccgccacgggtgaaggctttgatcgtcgggaagcccttgacctcgtacttcgcgcagagattgcggttggcagcctgtcggggaggggtgaggagcgatcagtcggctggcgcggcaccatcgctcggctcgtcgcagacgtacatcgtcacaatcgacggcgtagaagggcacgattggcgcgagcgagcctgccgccttctgaaactcgggtccgagagtcttgcaatgtccgcacctgagtgtaaggggcgacggaagaggcgtagcagggagggggctcggagggccgtcagctccgagctacgagggctaagcctcgtcgatactggtcggctaagacgcaccacggggcgtagaagacgaccattgacatcctctgttgcaggttagaatcttttagtcagcgatgatgcttcagggagggagggcggcgggccgagagggaggcgaggcgcacgtcttcctcgaggacctcgttatcaaacgtctttgcgtccaggttgatgacgggccggtcaaacgtgccggcctgtgcgaccgacaggatcgagagaaggaccaccgccagggcgattcggaggagcatgctcgagagacggaaaaggcggtcaatcagaggggaagatgatcgtggtggctcggcgggaagcagcaatgtgagccggcacgcgagggccgacttggccggcggcagctccctcgtcccgcccttgaattaatcgcctagacgctcatggtccaggcagttgacaagcatgacggctctgaggtaaggtcgtggacatctagtcctctaagaaggtcacgtctcataggatcgcagagagattgagccagggtacagctgatgagcagtcgagctaccctgctgcgcaatctcgagggcgatgctggttcgaggacggtcggatcgcgagtggcagggaagcaaagcatctagacgaggccggtcgagggcatacatgccagcgagatgcagcgaagccgtagaccatctacgagagaccccagctcccggcgttgagggctgtcggcgacacggcagacgtgtgcggcaggacgcactcgtcccgtccggcttggcgagacggtcgacttgcggaggtacgagggccgcaggaatgggagcgcccgttgtccgagaggagcgcctcaagctcgagcgctaggtgggtccggaggaatgagcgcttggccgactgcacaacgcctggatcccaggcgagccgaggcggaggccactacgtcgctcgagcctcagacaacgactgagacgtattcgccgaccttgaacgtctcccactggacggcgatccgctccgctgccgcgcaccggaagagcaagcggcccgtcaaactgagcgacgtcgttcgcgcgaacgactcgaggtagatgatgcgcggcgtcggccgaccgaggaactggagtggcaggggagagcagcctttcagctagtcttgaaacataggcaggtctagaattgagcatcgacgcacccgggcagcccagacggcgagaacgagtgggacgcaggtgccgggcccgttgagtagaagcacgtcggcgaacggaacccgttggtgcaaggcgatcctccgaacggcgacgagcagcgtccaggcggtcgtgaaggctggcagaaacgagaggcaccaagcgggcatcagcatcgcttccagtgaagaggcgtaggacgcccttccgacgcacccgcagaccagagcggctggccgaccgctcgtgcccggggcagctcgatcagctcgacagcattcagccctgaatgtcgcccgccgaggtcattgacgtcctccttggcaatctcgagctcgagtgcggcagccttccggaccgacatgccgtcgccggcgccgtggacgtagagccgccggctgtagcgccggcggtcgagcagccggagcacgctcagcatctcgtgcgtatggccgcctgccagaaaagcgggccgagcacgaggaggtcagcgtgctgcaaggatcccgcttggctcgcacagagcttcaggcgccgcctggccagcggaagggacggacctgagccgaggaaaatggcgaccgagcagggcgtgtcgcgagctcgtcgtgctggcggtggccggtgggcgacgatccagtacagccgaagcgatgccaggaaaagcaccgccggaataagcagcaaggctaacggaagcatggtcccgcaaccgagatggagagaggccggtcgacagcggtcaacgtcgagggcgaggcgaggcaagacgaggcgaggcgaagcaagccgtcgagcgcagcatcagcagcgacgccgacccgacagcgaggaagggagggttcagtctacctgaattcgaccgagccactgtcgcagcttccctaggatatcctcgagggcttcctgtcgtcgagtgctcgctggcgaaacgccttgccaggcgtctccgcggcttgcctatctaggcgtgcgctctggcgaagaacgtcagaagatgctgtcctcgacgcgatcactagcaggtgcggctcgctgcaccacagtcttctgtgccattggaattcatttcgctgacatcgtatttgttctttaccgcagctcatcgggctcttcgctctgcggtcgctcgactcgcaactcgttctcgatgcgcctggcatcgttgaccgccttcccaaccgctgcgactgccccgacgccacgaccgatatcgccgggagaggatgccgttgacctcaggcacccacggcgggcatcctgacagtttctactcagcgacggcgcgcggctcgtcgcacggggcgagcgtgtcagcaaagggccagccgctgtggcctcgatctatcacatgctgcttccctcgagtcaaggaacctgacgcagagatggcaagttgaggagggctgcgtgcagaacttgggagatgctcagcccagcgcttgcggtcggcggtataccgttggcggggttggccgggctgctgcgcgtaagtgctgctgccaccgccggcgtcgcctggccatcgtctgagcaaagagccggactaagcctttgcactcgacattctaagctgatgagaaggaggattggctactgctcgccagcttgctgcccgtcgacgccagacgtgttggggcaaccgacagtctcgcaccccccgccgtcgaggacgcgccgacgcgccgatttcgccttcgttgcgtcgagctcctaacgacagctcctgctcctgcccatctaccccgctcacccctcgaggtggtagagctcgttgacgtcgagatagcagagccgctgaccgcggccgaggaaggaatgctcgctcgccagcgcgccgcgcccggccctgctgcagacaactttggcggcaaggaaggccgctggaaagagggccaaaccgctggccgagcccgaccaaggggctcggccggccgaggctgctgaccgccggcctcctcctccttcaacccaggccgacctcctggacgaggctctttccgacctgtcggccatgtgggtctaccggttcgactcgagctggaaccggacttaccacctcttcgcgtgcgtcccttctcgcttgcttgtcttctgcacgaccgaagctgacaagactcgcctgcgcttgccctctcgactcacagcgacaccggcctgacgacctgagtgaggccggaggtcgaggaggagcttagcaggcccgacgtttgggacgagcttcggcacagcctgagggccaatctcctcgattacctattccgctccatgatggagaaccccgtccatccggcggcctgcgagctcgatgagagccagtgccgatcggacgatgctttcgagagcgtcgaaatcgaggtgcgtctctctgcagctgagctttcgtccctcctttgagaccttctgctgactctcacgcgctcggcccctcgacgctccccctggttgacgctggcaggactcgttcgatgacgccgcggtcactgcctcgctgcaggcggtcgctcatcacttcccctcgtcgagcatccttcaagttcttccggacctgggccgagttgcggccggcttcagctcggttctttcgtgggtcggcaaggttggtcctctctcggtcgagtggctgacatttcgaagcgcccttgctgacatcggcatcctcgatccctttgctaccatcgatcagaagtcccagcacgagtaaaacgctcgcggtcggtctcaacctttgcttttttatcgtgcgatccgcacgatacgcgctctgctaacttggactgcgctagtcttggccctgaccctccatttaacttgacatctcacttgacccctcccaggtggcttcttcccttggcaagtctatccgcctcgaccgctcgtgctcgacccgcgtgagatgattgccgtcggcgctacacttgcgcacccgaggcgagctcgacaagtggccggtttttgacccgattagttctccatttggcgcgccgtgcgctgcagggcattctcagctgacgattgactacgctcgatcgtcccgtctcgaccagcaacagcgctgctcgagcccatcttggccggccttcgccggtagcagtctatgcttccactcgaggcgagcgtcgtcttcggcggccatcaagagagccagttctctcgcggcgccgacgtcgcttgttcaacgactcatcttccctgagtctctgcgaggttggtccctctggcggcgtggtcttttgtgccgagtggctctgctgacttcttgtacgtgtcccgtcagcttttcaccctcggcaaaccgccaagaagggcgggcattcgcttcgctaacctgcgccccccccgccggccgtcgacggccctccattggcgactgttcgtcctctcaaaacgacgttcgtatcgcccgctcttctcggtacgtccttgcacttagcctcgtgtctgccgcgttgtcgctcccttgactgacatcggcattcgcctggtatctccctccgccttccagccgccagaaccggtaagcgcctctctgcggctcgtctgctcgtcggcctagcctcgagaccctgaccctcgccctgcagctgaccacctcgatcgctatccctcttgaccttcaatcaggatcgcactcgtctccccggattgcacgcctcggtcatcgtcctgtcggcagggcttgccggtgcatcgcaccggggtacgtccaatcgttctcatatctgctcgctcatacccggccagaccgctctaccttgccgctgatgtcttgttgcgcccctcgcttatttccggcgcgcttcccttctacaagccccggcagccttatgaccgacctccgtgtcagtcttcccgtctgccttcctgttccgcccaaacagctcgctcgaggccgtgcgctgaacctcctttacttttctgttgcgcccctcacaatgcgagcccttcggccaccgccgccgccatcggccgttcttcggccgcccggcctctcccttcggtcctccggtcctcggcttgcggctcgcagcgagcttttgtcgcgtccgtcacgctcttctcgcccagcctgcaagactgcgctaccgtccggttctatcgctgacctcccgatctgcgcccctccagcctctctgaccgcctcctccgtcgcaagccgttggcccctgcgagatgacgttcaagcctttgtgtcagtcttcctttcccctccacctcccagtcgctccgcgcttgcccatccaagcaaggcgctgaccgcacgccttcggccttccttcctctccaccgtctccccgcccgtcgctcctctgaagcgtgccagcttgtcctgcctttccatctgacgactcatgaccctttcttgctcatcgactgctcttgccccggtaagctggctccgaggctgcgtttcgactggcacacctgtcgctcaacctacaccgcaagcaaggagtccttgaacctgcccctgtgaccctttagttctaattgcttgacggtctttccacagcccactcgacagccaggtagtcagtcacaaagagccgacttgtcggcttcgttcgcattggctgcgcgccgccgccacgagacgccacttctctcgtgcacagtatgcagccctttcctgtcgcaacgcttcagcctaccggtcccggtcatcgctgcgcccctcttatggctgcaccgcctcgttctgcctgggtttcgactccttgacttagctctcgaggtcggttcctttgctggcgtgcctgctctcgcccacggtctctgctagctctcgagccccctcgtccagcaggttcaaggctcgccgtcattctctcggtctgcctgcatccagcccgtctggtcttctctttggacttacgtctatgtctgcgcgttcgattctcgatgaactctctcttctgttacaaaccttcgccttagctctgcatcagcagctttagcgaacgacgttgcgaccgggcggcgctactttctcactttactgtagcttctcgagtcaccccttgacggcagccggtccggaaaacgtcaaatggcatggtagagtcgagcgattgaaagtcgtgcatccggcagagaggagccccttcaaagcggctcaatgttctcgcgcgggccgagcgggacgacgcgggtcgggttgatctgcgggtgcgagtagtaatagtgctccttgatgtgcgcaaagtctgtcgtgtccttgaaggctgggttcttccagtagagctgcttgagccacttgttgagccgcgggtacgagtgccgaactgttgaaggagcagagcaggagaggtcagccaagtgctcttggccttacagcagcgagcggaaggcgacgcactgagcgcaaggttgcacttgaagtggccgtggtagaccgggtcgaagcggacgatcgtcgtgaagagcctgcagagggcgagaagcttggtcagtgccttgggtcagctgcccacctcgagcggcctgggacgcaccggacgtcggcctccgtcagctggccgccgacgaggaactcgcggccgtccgagaagaggtcctcgagccagtcgagcgtcttgaagagaacgatgacgttctcctcgtaggccttctgcgtcgtcgcaaagccagacttgtactgtcggcagcgggaggcggaggcatcaggtcagacgggccagaacgggcagagcctcgagggcgagcaggacgtacgacgccgttgttgaccgactcgtagacggccttgttcatctcttcaatctcggcctggagcttggccggatagaggtcgacgtccttggccgagccctcgagcaggccgttgaagccactgttgaggaaacggataatctcggacgactcgttgctgacgatcgtcttctgctcggtgtcgtagacgacggggacggtgtagctggaactcgagcgaggggcgcgagtcagtgtgcgagcgagtgactgccgatcgagagagagagaggcaggcactcaccgggcgtcgtacgacggctcgaccatgtggtagacgtcgcggatgtgagtcatggccttgccctcggacgacgagaggttgagcgtgtcacccgtcgcggccgggaaatccttgttaaacgaccagcccttctccagcatgtgcgggtgaacgatcgagacgcctggcagaacggcggtggcggcggcggtcagctgtcggcgagctgccgatgggtttgagcgaagacaagggatgcaccgatgaaatcctcgaggcccttgagctggcggacaattagcgtccggtgcgcccacgggcacgcgagagagacgtagctggatggtgcgtgcgacgggtgcgatgaggggagggagagagggcggcgacgtcagctccaggcgcgggcgcccgtaagatggtccctctctcttccgccgggacggacaggtggtaacggcccttggccggctcaaacttgccgccgggcgcaatctcgtcgcggaagctgctgacctgaacagcggcgaggaagatgaaatgtcaggcgggcttggcgggcgaggcgatggggagggctggccggacctggcgcttgaactcgccgttgtccgacgcccacttggtgatgtcgctgttcttgttgtcgctcatcgtggctgctgtagatcgggcaaaggtgcggctgctgaagagggctgtcggataaagggtgcgggtgctgctgaggacggtgcgaaagaccatggaggtttggaaggacgaagggcaatcgtcagccggctgcgccctttgaagctcgcggacgagggcgagggaacgaccctgcccggcctgggactcgacgactcatccgccagactggccatgctgggatcatccaagagacctcagcaagctgcctgcctgctgcctgctgacgcttgccttcgctcgaattccctcacagatcgcgagaagcttactgccgtcgtcggtgcgccgagtgcgcgcagcagcagggacggcggcgtcatcctgctgacagctcgaccctcgtgccagtcgccgccctggacgtgcgccactcgatctgccacaagatagaaggtcattctcgtccagtcttgaggagccaccggccgttcggccccttgacgcagcccttctcctcgagccaccgctcggccttgccctggccaggcgcaccctggaagcctagcacatccgtcccgagccaagccaagtcggccggcccgacgtctcggtaggacgcgcgggcggtgcgccaggccgcttcccgctgcttgggcaggccgtagcggagcgcgagccgttcgagcgggtggatcggcgacggggggttcggagagaggaggcggaggagggcaacgtagttgaaggtgacgtgcgctcgatagatctggcgggggacgacaagggccaaggcgtccgccgagaggaatgaccggccgatctccttgcctttccgaggggcggtccaccggcggtggtcggctggtgccgcggtgccgtagagggccgacgacgagcctgtcacctccgagatgacttcgacgaaggacgacggcgactgaaaatgcgagagctggagaatgagaaagactgagacaaaaaggtctcgctcgtccgctcgagatggactgctggtcggagtggggtcggcgatggggacctcggcgacagctgcgcctcgcagatgcggcggaaggtaggcggccttaggctttggccggtctcgcaccgacagttctgctaggccgcttaagaagacgtcgtcggcagagctagaccgagcgacgttcgggtagagatcgcggacgagcgccgacagggacgagatgaggtgcgggaggctggcggtcttgagagctaggcgggcagctgtctcgtacactacctcgacaaggggagtcagctatggcttcagagctcaaacgcaagccgagtcgaacggaagactcacccttgacggcgaacgcatcccggcgcttcgaggcgacgataccttcgcggagcttgcctgggttcgatcgtatgccgcagcgtcagcctcatccccatctaaggcgacctcgtctggcctcacggagcaggaggagcatgtcgactgcggcatagtacgcctcgcgctcgtcgtcgatcgagagaatcttgccccaggagtcgtcgaggaccaagccaaagcgggtccgcaggccgtcgagctggcgcaccagcgaaggaaggagtggtcgtcagctgccgtctaaaacatgcggtcaggcacagaacgcaccttggcctgtatgtgctcccggaactgctcctggacggcgtacgaaaggagtgcgtcctcgtcggctgcatggccgccggagcgcgatggcgaggcgagcaggtccatctgcccgagctgccggcgagctgtcggcacatagtgcttcaagggagcggccatcgcgagcggtaacgttggcaacctgaccgagggagacgagcttcgttgggcaggtgctatgaggatcccgagagagaggagtcgtcgttgcttgtcgaggagaaggggaaggttgaccgcgctccttgccgggagccgaacgtccggcggaggccgaaggtgcctcgagaagagcatcgcagagcctgatcccgcctgaggtccttttacgagcagatgcaagggcggcatgggagagaggagccattgcagtgtcgagatacgagcgaggtcatgcggtagaggggcccagcaggccgtggctggagaggtcgagcgagctggtcgcttcgagcagatgcgcctaccgtcaagcacggccttccggccgccggcgagtctgaggtagcgacgatctcaagaccgctggccttctcctggagggcttgactgcctggacgataggttggccggttcagatcgtcggcttgcctccttgcggctccctcgggtcgcgagggcctggtacgagtcgcgcgccgtacgccctgcccgacgaacgtccgggaggtcgaccatctcgctcgtcagttcggcgggaccatcaagcgggacagcttagtcgcctgcaagggagaacgtacgggccggcgtccttccgaatctggttgagcgcctcaatgttggccgcacgctccggcttgtagtgcgggtccgcagccggcgtcgtcgtcgagccggggggtgcctgccggctagatgcggcagctttagacgtggcagcttcagacgtggcagtcaagctagcagcggcgtcgccggcgaggttgtggtcttgagggaggatcggcatgcgcttggtcgggggatgaaggacgagaaggatgagatggtgggcgttcaggagacgacgcgcaggcaatcgacgagacgtcgcgtcgtcgacgaccagcctttctccggtcgcgaacggcttgctctctcgggcacgcggatagagcaagtgatctgaatctgatggtacatgatgcaaggcgctgaccgatggagcaaagggaggggtgggggattatacaaaggggggcactccccgggtcgtctaacaggcggggtcgagagaaggggaaggcgagacgcctccttttgcgacggtacgagtctagcccaggaggtcgcccataccggcggccgagatggcgaggagggtgtctaaggcgcagatgggggaagaggtcagctgagcgtccggttcaaaaagcgcgctgaaggcggccgacgcaccctcctcgaggtacttcgagacaccgatcgaatcactcaggcccttgcgccgccgagacttgaggacaagatcgcgggcgagggctgggagagaagcaaaggtgagactggtcagtgaatgatccgcgcgagctcaagacagcgcgctcgacgtacattggcccgaagcgggctcgagaggccggaggacgatcgacgtgtcggtcgggtctcccgggacgatcgcccagtgatcaaacgtctgcgtgcagaaggcctggccttgcgtcgcagctggggaacgcagagggaaaggggtcagcgaagaaggaatggtgaggaggaatgcccggacgcactccgtaggtcggtctcgaagccagccgagtcgaggacggggatgagcgccttgacggtatagagcggcgagccagccttcggcacgtccttcgtgacgtgccctcgccggcgggcgaggacggtaaagacggcggcgacgcagtcggccggcgcctggacttcgaccgagtacatgggctccatcagccggggcgaggccatcaggaaagacgagtagcacacccgccgggcggtcgggatgacctggcccgaaccgcggaggatcgcctcttgcgcgatcgaggcgtcgaggatgcggaacttgacgttgcgcatcgctggcgagagtggagagcggaagaggtcagccagcggacggatgagacgcggtggccactcgggacgaacgctcgtcgcaaagcgggccctctcgcgagccccactggaagccctgcttgatgctctccttgacgctcagcatcagcttcttgtcgacttcggacggcagcgtgtcgtccatgaggatgttgggtccattgtcgtcgggcccaaacgcccagattgagcgcgaggcgagcaggtcccactggtacttctgctcaaagtgcttcccccgctccttggccgtcatccgcatcgaaacccggccagtctcgatgtcgtccgcgatgcccgactcgagcggctcggcaatgaccgtcagcttgttcctgcaaggttcgggaaggggcggtcagcgcgcgaccgaaacagcaagcgagcgagagcgagcgcacttcttgttgggcgtctcggcgtagactttgagcgccgacgtctcgatgacggtctcgcggaactggacgaccgggtccgagaccttgatctcaatctcggcaaatagctttcgcaggtcgtgcatgaccgagtcgaggtagagttcgcccgtgccgaggatgacgtgctcgcccgactcttcgaccttggtcgcgacgagcgggtacgacttgttgatcttccggaggccgtcgagcatcttggggagctctgagggcgcgatcggctcgacggcaatcttcaggaccgactgcgtgatgtgcttgagcgggctgaagatgtggagctcgtcctcgatcccggtacgggcgacgatcgtcgccgtctttgtgatggaccggtcgacaccgccgacgaggacgagcgagccagccggggcctcctcgcactcgacaaagtagcgcgactcggagacccaaatagcctcaacaaaggcgtcgacggcgtcctcctcgtcgtcggggctgtagccctcgccgaggacgcgaaccggctggcctcggcggagcgtgccggccatgacacggccaaacgcccggaattcctgggcgtcggccgtgtggtagagcttcgacacgtggaagacgacgggcgcggccgggtccgcatcgaccatgctttgggccaaggccgtgttgagcggaccggtgtagcagcgctcgaccttgcgggcggctgcctcgcgcggcgagggcacgtggtcaacgagcatgtcgacgaggccggtcgacgggccgaagaactggtcgaggacgaccttgaggagcggcttgacgtcgatcttgtaggtcgccggcttgagctcgatcccgagcccctcgagcgtctggcgaaggttggccgtgtcctccgagaggacctgcgtgtaaatcttgtagagcggctcgagcacaaagtggacaaacgaccgcgggtggccgacgccctttgacttttttgagaatttccgcgtctcgtcgtcgtagaaaatgttgccccagagccggtcggcaaacgcggccgtgtccatcggaccgtacgtctgactgtagagctcggcaaaggacgccgtcgtgaagcaccagcccatctgggtgctcgcaaacgcgacgttgccgatctcggggctcagccggcgctcgggcgacgggtcgaccgaggcgataatattattaacctcttcgatcgtgtgcttgatcttgtagtaggcctcggccggcggtaggcgcaactcgaggatcagccggtccatcttgttgacgacgaggacgatcgagaggttctcggcgatcgcgtagcggatcaagtcctccgtgttggccatcacctgcgcgcagatgcatcggcgacatgtcagtgcaaggtcaagaaacgcgcaacgcaaaaggacgtacaccctcgacgacgtcgacgacgagcaccatgccgtccgagagccggccggcggcggcgacctcgtcgacaaagttgacgtggccgggcgtgtcgatcagattgatcaggtgtgacttgccgcgcgtgttttggaggacgagcgacatgggcgacgacttgatcgagatgccgcgcgaccgcgagaggatgtgagtgtcggtgtagcgctcctggagtaggattgagaggggcgtcatcggctgggcgacctggcgcagggcatgaagcagcagacgcaccggctggtcggcgttccacgtcatctggtgcgtctcaaagacgagcatgtcgagcagcgacgtcttgccgtgatgcaggtggccggcgacgacgacgttgcgcatcatgtccggatggctcatcatgtcgagcatgaagctggaagaaggacgccatcagcgtcgacgtcctgccacagcagccagtccgcgagctcgctacacgcaccccttgtcgaaccgggtgatgggcatgttcttctcctcgacgttgtactttcgcaccttgatcggcgcaacgatcggctccgtcaggagctgcgtgtcctcctcgtggacgagcgcctcgacgtcctcgccgtacgtgtcctcggtcgaggcatagtaccgcttgttctcgtgcaggacgatctgattgctcggtccggctgcaggcaaggagggcgagagcaaggcacggcagcggcaagcggcggcggcgcgaggcaggccggaggggagagagtgaatcgagagcgagcgagcacggtccgtcagccgctaactaggacagatcaccaggcaacccggctgaaggagccgccagtacgccacagcagcgagtgaaagacgcaccgtcgtcgacctccatgtcggccaccgagtcgtcaacgccagccgccgtgccgcctgtcgggatcccgtcaaacgcttcgctgccgcggacatcggccggagcgtcatccaccacacggtcgtcggcgtccgagtcgtccgagtcggagccctaatcgagagggcagcaaaggaagagttgtggggtcagcgtcgcgtgggtcgggcgcgagagctgcttcgacaagacgaggacggacaatgtagtttccaaactgcggcggcggacggaaagatggtcagcgagcgacatccgagtgacgaagcgcagaagcgccggacgtacctcgtcgtactggtccatcctgcgaaagagggagttgggaagaagggaggagaggaggaggaggtgagcaagatgaagggtcaagctgttgagcgtcttccgcctgcagggcgcagaagggcgcgcccgcgggcacttttgtatttttctcgcaggcagctcgagctcgcgggcgaccggcgtcgcccctgaccagaccctctttcgcctgctctctctcctcaagcagcatgtccggcctcaacgacgagacgctccatcgggtgagtgtcttgtagcttgcggctgtgcgatgccgacgctcgttgagctgaacgggccgacctctcctgccttgctcgcgcctacctcaggtactccagcagatccagctccagctcgtccgctcgcgcaaggagctctcgctcgtccaggcccagatcgccgcaaaggacaaggagcgccggatcctctcgctcacaaagcgcgagattggggccgtgcctgagaaggaagagtcgggcgaggaggtccggatgtacaagggcgtcggcaagatgtgcgtctgctcggcgtcgtcggtcgacacgcgccttggtagccatcagagctgaccccttgcccgtcgccctgcgctccctgtctggcaggttcatgcttcagccccggccagagatcgtctcggagcaggccaagctcgacgcagcgctcgccgacgagctcgccaacctgaccaagaaggtccgtccccctactcgtcgcacgaccgcgcgcgcgtcacccccatcgtctgactcgcgtttcacctctcgcccctgtctaggcaaagtatctccagaagcagtttgacgatgccgacggccagatgaaggacatcgtgcgtttcttattcgctgtgtactctcaatcgctcgctcgaggctgacctgacggatgtcatttgtgcgcaccctgccttcagttccacgctcagactcgccagcagcagcagcagcagcagcagtgaagtcgcgccgactagcgccagcctccgccagctttcgacctgggctcagttctggctgccgccagaccaagtcgagctccaagccttgggctttcagcccaggctggccataagaacgagccgcccggtcttcgccagccgacttggtcggcggaggggaccgcccgatcgctcttcgtccgctggatgagggcaacgagcctcaattaccgcatctgatgcagcctacgggcctcggacgcgcgggcacagccggctcttgacgagcggcgcgcattatactgatgactctcgaacgtcggcgagcgggaggcatgcagaacggcaggagaggggagtgataggcgaggagagagcgtgcaggacatatagacggaacaagggcgacaggataacgcgaagagcggatcgggcgtgtgctagatgaggggctggatgggaggaaatggggcagcctcagacggcgacgcccgcatcgccgtgggagcgcagcctgggaccgggcgtcaccggaagcgggcggtctcgcttcggtacgccggccaccgacgacagcgacgccctcggcgccggcgtcggcgaggtcagggacgccgagaggccagagagcgtcgagaaggccaggtcggtcgacgaggccgagggcggcggggcgactgacgaggtaaacggggccgaggctgatgggctgaagagcgatgagccgggcgacgttgggctgacgcggagggtgaaggcgcagagcaggcggtcggccgacgtgtccacctggcgaacggggggccgaagggcaggtcaacaacagcgggtgaagaatgagcgtaggccacaggcgtcgacgcacgacgacaaactcccagtcgccctcgtcgccatccatcggcatgccctcaaagacgcctccgcggaacgcaatccaaggcggaagcggctcggggccgacggtcgtgcaccggagtgcgcggacgacgcctggccgttttggcgcaaacgagaggtcaaagacggggtggatgacgaacggctggttgagccgtgcctcgtagcggacgctgctggtctttgcgacagacaggtcggccgacgaaggcaccggcgagaagtcggggtacgaccggctgcgctgggggccgagagacgcaaacgagtcgttgacgtaagggacgatggtcggcacgccgtcgatcggataaaaggcctcaaacgagccgccgctggaagagtactcgctcccgaaacgatcgtccgaaaggtcgatgatgaacgaccggtcgagctcgccgtcgagggcggccgcgaggccggcgagcgagactgtcgactcgacagcaacggtcgatgccgacgtcgcgcccgcggtcgtcagacgctgtgtctcggccagctcaccgtcattgacgacgatggtggccggggcgagagctaacggtccgagtgcaaaggccgagtgaagcgagctcggcgcgccagagacgcggacgtgcatcgcgcaggacgacgaggcccgttcggcgcgcgagatgacggcgcgctcgtgcgagtggcttgacgacgacgacaacaacgacggcttgtcggtcgacaggcgccgggcgatgctgcctgagccgtaaaacgaggggagagagatatcgctggactctccaaccggctgggggtcagacgcgggcgtctcgttgctcggccgactgtaggtgctcttgcggctcttggccgaccactcgtaagtcgttggggactcccaggacgcccgtgtcagctcgggcgagtcgaagttcggcggctcgggcgaggcagagtctgaagagacctgccggtggactacggcgatgagcgcggctgccggggaggggaggttggtccgatcgtcggcgaggcgggctgcttggggcgggggagggagcggcgtgccaagcgacgagatggagccggacgagctgacgctgcttccgtcgccaattggccggcctcggacagaatagacgtagaggtaggtcgacatcgtctcttgcgagtaggttgttgccgtcgttgtcgtcggcaaggccggctgcttcgtcggctcgttgaccgagccgactttggtgctgacggtcgagcccgagatgacgcgccgtgcgaccgagacgatccggccgacagcgaccgacagtgtgccgatggagggcctggcgacacgagcagagctcgccgtcgtcaatgaggtcgagtaagggagcgagtcggaaggcgacgaccggccgccgtcgttgacgagctcgggcgtctgaccggtcgtgtcaaacgcgccgcgctcgctgtcatacttgagctcggcgatttcggtcaggtgcgcgtgctggaccatctgccgagggcccggaaggactaggtcggccggcggcgagtcgtcttcttgtccaagccgacgccgagtggatgtcgtccggagcgcagcggtccaccgtgcgcgcgtcttcggccgtcgggagaggtagacgaggaggatgaggagtgcgagggccgcgagcgatccgatgacgacgccgaagagccgcatgcccgtcagcgtcaagccggggtacaggccatcttcaggccgattagggacgacgttaatcgtccgctgacgatgcgagacggcgttggtgatcgagtcgcgcgcctcaaccgtgatgacgacagacgcgtacgcgaggctggtcgggacgacaccgtttggagcggttgcgccggtgcccgaagtggcggtgagccgaccagatgaagcgtcaaagctgagccaagagcccgcctcgcgcggctcaaagctggcggagagctgtggccggctgccgaccgccgcgttgatcgcgtccgaggcgacgtcgaggacgagcggctggccaggcgtcgccgtggcgtctgtttcgtacgccgggcctgacggtaaaagacttgggtatactgagaggggaagggtgaaggcgaccgacgagccgttgctatacgtgacgacaaccgggagggccagcggtgagcgagatgtcgtccagggtgtcgcagggtacgactcatcggtcacgaggccggtgccgatattaccggtgaagaagccagtcctgagcaaggagactctcacagtcagcggtcgagcgcaggccagacgggtaaggaatgcgcatcggtctgaccagacgaggccttccacagcagagcaatcgaccgcgatgctttgctcctcgccgtccagaagaatcgtcgcgagctcggcggttagcggcgtccatgaatgcagcagagcagcgctggcggtgacgttaagccgctgaagggtgcgagctgcggtgggcgcgggcggcaacgaggcagaaggcgaaggtgcggcggttgacaaggaggaggtcgagcggaacgaggaaacagacgaaggagcggtgtcgctgcccgccaagacctcgccaggccggaccgtcgcgctgacgacgagttcgaagctctcgcagatggcagcgatggcggtgatgaccgacgcgtcggctcgctcttgaccgcagagctggacctgccagacgccggtcgacggcggtgcgaggccagagaagaagaggccaacggggtcgaacgcgagccagggagggagagagttgcctctggcggggacgagcgaggctgagtaggtgagagaggcggctgggggcgaggtcggggagaggaaggtcgaatgcgagaaggcgattgcgaacgaccactggcggaagcggcgtctttgggtcaggactctgcgcttgagagggacacaggatgccgctgtttgactcacattaggtgggatccggaccgagggcatcgtgctacctgactcggcggcagccggcaggaggtaaacagagctgatggccgggttgctcggaacgagctggccggcaacgcccaagacccccgggacgccttgagcaggcgcccgtccgatgacaaggcgcgagccgtatcgtcgatgtggcattgacggacgggcggcgacgacggctgacgtgctgaggagggcgagggcgacggtggagaggattggaggacgcatcgcgaccggggggctgaggagccgggggagagagggatccgaggtagttggccggtgagctggagacgaagagcgaggaggagcagaagacacggtgaagggttgcgctaggagcgagggtgaggtgttgcgagacgagagggtaagagcggccgagaaagagagggaggagggaggaaggcaggtagagcaggctcgactactcgccgcctggcctgccgtgttggggggccgggtccgtcgatcggccttcacatgcatgacgaagcatcggcccagtgaaaggcacgctcctcctggcaggagggggtggcgcaggcaaggcacccaggagaggggaggcgtgggtggacgaggggaatcaggcacctctgcggccgccgccggggttcggccacctggccgtagctgtcggaccgacgagggctgtcagcggggtagcatgagctgtcagtagcaagtccctcctggtcagggctgtctcgttgatggcgagttaagaagagagtgacggacagcagggaaggccgactgcgaggactccgcgttcgccccctcgacatcgaccccctttgcgttctctctctcaagccatgtcgaccccgccgccgcccgccacctcgccagacaacaaggacgatggctggatcacctcggccccgtccgagacggccgccgccaacaaggagccagctcagtctgagccgacccttgctgctgctgctgctgctgctgctgttgcgccctccgagccaacaccgtcatcacctgcgccagctgccgctgccgcccctgcacctgcggccgtctcagacggggactccaagaaggccgaccgggcactgagctcgctcgcgagccgcatcggtggcctttccaccgacgcacccgaggaggccgaggagaccaaggcggtcgagccgccggcggcggaggctgccgaagatggttcgtccacgaacaagctggccgactggcttctatctcgcgagcaacttgcccgaatctgttggagagcgccttcgggcatgacgaaagggcggggcgcccggctcgcagcttgtcctagtaggcctcaggctggggactgacgtattgctcgacctctttcagccgacaatctgacgcccaaccggtaccaggtctcggtccgtcgccgtcgacaccttgtcaggcctcagctagctaggcgctgacgttcttcgctctctcgatgttctcaggtgacgctcgccgaccagcaggcggacccaaactcgcccttgtttagcatcaagtcgttcgaggacctcggcctgtgcgtcgtcgactggttgcgcctgttcccctttgtcttcgactgctaaacttgccacgctcctctaccagccacccaaatttactcaagggcatttacgcaatgaagttccagaagccgtccaagatccaggagcgggccttgcctctcctcctccagaacccgtgcgtcggccggctgcgcccttccgccctgctgcctatccgctgacgcactctgcaattcctctgacaggccgcaaaacatgattggccagtcgcagtcggggacgggcaagacggctgctttcacgctgacgatgctcagccggaccgactttgacctcaacaagccgcaggttcgtccgcgagtcggcctggctagtcgctcgcaccgctgacctctagatgcgccccccattcgcgcgcacgtccgactgcaggccatctgccttgcgccgtctcgcgagcttgcccggcagattgacgacgtcgtctcttcgatgggccaattcaccccgctccggaccttcctggccgtcaaagactcctttgacaagcactctgcgccgactgacgcccacatcatcattggcacgccagggacggtcctcgacatgattgtcaagcgcaagctcgacgtcaagaacatcaaggctttcgtccttgatgaggccgacaacatgctcgaccagcagagcttgggcgagcagacgctgcgcgtcaagaagttggtccgcctgagtcgatatcggaagccaggcgacgtccctgctgaccccatcgaacgcccccagcatgctgcccaagacgatgcagcacatcctcttctcggcgacgttccctgacctcgtccggacgtttgccgccaagtttgcgcccggcgcgaacgagatcaagctcgcgcaggaggagctatcggtcgacggcatccgccagttctacatggactgcaaggacgaggcgacaaagtacgacgtccttgtcgagctctacagcctgttgacgatcggccagagcatcatcttctgcaaggcaggtacaccatcttttctcctgcctccgaaggcctgccgctctgacacccgacctcccccccttttcctctagcgccgagactcggccgaccacatcgcgcagcggatgcaagccgagggtcaccaggtggcttcgctccacggccagaaggaggccggcgagcgcgacgccatcatcgacggcttccgggacggcaaaaccaaggtcctcatcacgaccaacgtcattgcgcgcgggatcgatatccagcaggtcaacatggtcgtcaactacgacatgccgctgacgcacgacggcaagcccgactcggagacgtacctccaccgggtcggccggaccggccggttcggccgcaagggtgtcgcgattgcctttgtgcacgacaagcgctcgtgggacgagatgcacgccatcgaggaggacctccagcgcgagatcatccgcgtcgacacggccgactttgacgagatggaggcggtaagtcggcctcgggcggctttggctgcatcctcctccaactcacctggctgacctcgctcgacctctgccgctccaaccagaccatcaagaaggcgatgaaatcataatgtccttctactccgggccttctcgtcgctcatggtcgacctcagtcagcgcgcaggggactcgagggacgacccctttgcctcagcaagcaacgtcgtcagagcaaagagttgaaagcgttaaggactaccaagacaggcgcaagggcttacctagccagcgatgagccctcaatactaagcttgatgatgacaagtggcgctggctggtccaagcgaactcatgcgccagcgaggcgagcttgagcgcagcagcagacgaggggccggcagctgccgaccccgtcgagcttgcccctccgacttccactgtcccatctccagcgatgacttccctcccagactcagtcgatatcccggaagcatcctcgctcgagctcacggacgctcgcgaggagtccgttctcgacctgacgatgacatggtcaggcaaggtgagcgagcggcaagcaacgacgggagagagagcttgaccgccccctgtcgttagaccggctgcctcatcttctcctttgatgcttcggcgctgacactcgagatcgtatggctgggcagacgttcgcgctcaaggtgcccgaccaggaccggtctgtcctgcttgctctgctcgaagatttgtaaggggtcggtcggtgcgagatgcctcttgctgatcgagctggctgcgcggctttcccccctccttgctgctgacaatctatagaatctacgacctcaaggtgagactgttgcacgtacaagagacgagctatggcgcgcaggaagcaggccggccctctacatcctgctactggcaggcaccgaacggcagacgcctcccctgtcagccgagcgttgtcgcgtgcgtgcgctcacgccccctcccctcccttttgctcggcagaacacaatttggtcgctgaccgaggtcccgcctgagcggctcaagattctcggcctgacgacgtccaagcttccgccggccgactcggatgtcgtcagcgagctgaagatcaagaagggcgggcgcttcatgtgcctcggtgagtgcccgaccggctgcgaagccctccgcttacgtcgtgaccctcgctgacccgaacattatctcaggcacgagcgaggccaacagcttcaaagacccgacccggctgcagaaggccgaggttgaagacgattgggacatcgactatgccgtcgagagggtcaagccgcacgaggtcggtcccgcgtcaacacttcgtcacgtctggcgctggcacggcgctgacgagaagatgccttgcccgccaggatccgcgaaacaagcgcaagatccgggagaagacggaggctctcgacgtcgaggtccgtgcgacaaatctcccagcgccaggcgcgcgccggttgactttggccttgctccacagctcatcaactcactccggcctggcaagaagctccttgtcctcgatcttgatgcgtgtctcgtcgacaccaggccactcgtcgatggaagacttccggcagaggagtgcgctcggccaggcctacacgctttcctcaagactgcgtgcgttgcgttgagacgcatctgctaccagcggaggcgcatgacctgacgctccgactccctcgccctcaaggtacgagaagtacgatatctgcgtctggtcgcagacttcgtggcgctggcttgagagcaagctgacggagctgtcgatgcttggcgaggaggaggagcgcggctaccggctcgcgtttgtcgttgaccggcggcccatgttcaaaatcttctcgaagaagaagacgggcggcatcgtcaaggactacagtcacgaggttaaggcgtgagtcggtcgcggagactacccgagatgcctcccttttgccctggctaacccgcgacgtcttgcccgctgcccgacagcttgcagatcctctggaaccgcttcccacagtacgggcccgaaaacacggtccacatcgacgacctgcagcggtgcgtcagggctggtctatgactctcgaccggtcgcacttcgctcttagagctgatctctgtcaccgtctcgctcacgcgcaactcgcaactcgcctctttcccttacccccggccgccgccttttcgcttccttcagcaatttcgctatgaacccaaaacagggcctcaagatcaaggcgttcaaaggcgcaggaacggcggcggcccgggccgacaaggagctctggcggctagccgactacctgattcggctggcggcgctcgaaagcttcttgctcgtcgaccatgccgtcgtgcgtccctccttactgccttcgatgctggtcgctcgaagcgctgaccggctctttctctatcggcacgctacaggactggccagcgtaagtcgctcttttcatccgggactctcgagactaggcccgtctccttcagacggctgactctcccttcaaaccgctctccagcttccgcaagcacagtcaccggtgatcggaatgcctttcccacagcagctcgcgagatgggagggcttcgaaagcgcatcgaggcctcatccatcgctgccagcagaggccatgctgccggcaaactcctttgcccagtcgtcgagctcgccgtcactctcgtcatcgtcgtcgtcgctgccgtcgtcctcctcaccgtcgaacccagcctgcgacgacgagaagcccgaacggacgctcgccgagtcgtcaaacgagacggtccgcgggatccgtttcggcgagcgaccgccgtctgcgggcagggcagcgggtgccgactttgtcggcgaaggcgtccgtgagcggtcgtttgcgagtcgcgagcgtttcggcgagggacagcgcgtcgagggttccgtctgggcgaggggcgtcggaggggctgagccgtcaaagagcgagtcgggctctgaaggcgccagcgaggacgtccgaagacgcttctttcggatcgcaactgcggcgaggaggagtggatcggaggaatggctggagacgctggtggcgactggctcgggggatggcgcaggagggtgggctctgagcgagtggtggaaagcgctcggcgggacggtcagccatgagagtcgtctggtggtgtccagactcagggaagggcggacgcacgacggctcggcctctaccgggattgctgttgctgctgccactggcccgtctccagcctccgtctccgtccccgtcttgacgccctcgtcctcgtcgtcctcatcgacctcgatctcccggccgccactgcccatcccaaactcgctcccgccctcgctctcgctcccatcgagaaactcctcaagctcgcggtcggcctggccccagtcgatctcccggacgaggccctcctcgagctcgccgaccttctcaccctcgtcctccttgccgctcccgccgccgtcgccgttgaccgccttcgtcgttgtcgtcgtccgtgacggaggaagaggcggcgtcgtcgacggctcgagctcaagcatgaacggctcctcggcctggcgctcccagagcgcagacgactcaaggagccagcccggctggacgatggcaatccgctcgcggaaggaagggccggaggcctcgtggactttctgcgtcccgggctggaaatcggcgaggcggggcggagcgaagggggatggagcaggactcttcagcatggcaggagagtaagggaaggggcgccggccagggacgaaccttggatgcaatcaggtgggtgacggagccatcgattcgatggctgcacgtcgcgccaaacgacgaggcgagcttccaccagtcaaaactgcgaccgcccgagacaggcaagagcaaggcctcagtaactctctttcgcctaaagaagagagaggcgcaacgcacgtctctggccggacgccgagcgggataacgcccgaaaaaacgacattgacgccagcaaggactttgcccttgagccggtcgataatttccttgacgtccggcggccgcgtcggccgctttgcgtccttgagcgcagagtaggcgtagtagtagcgcttgtggatctcggtgaggagctgtgcgtgggacgagaaacagggttcagcgtcggagaagcgcagcgagcgtcaggcaggggaggagaacggaccttctcgacccgctcgagctccgtatcgcggtcttcaaacagccactcccagtcgggactctcggccgcctctaaacccggcccggcctcacccgcggccgcatcagggcggtccgatgcgtcccctgccgccccttcctcgagcgccggcactgcatcaccgtccgccgctgccgccggcgtcgtagagccctcgaccgcctcgctcccgagcggacccaccgccgccgacagctcgcgcctttcctcctgcgcaagttgcgcccgttcaatcgcagcctgcaggggcctctcctccctgacgtcctcgagctcgcgcgcgtgctcgacctccagctcgagggaggcgtcgccggcgctgatggcgctcgggtgggtcgaggtggacggcgtgggcggcgggagggagagtggcgaagagggggaagaggcggatggggccggtcggtcgtcgacggctgccggcaccggtttgtcgctaggcaaaggaacatccgccgctgctgctgtcgctgctgctgatggtgtcgtccctgccgctgctgccgtctttgctgtcgtcggctgctgcgcctgcttcggcagaaaagcgccgttgatgtcgcccgtgccgacaaagaactcgtctgcctcccgcgagggaggtcaggggagaagaaagaggaggagataatcagcgcgctgacgtcgggaatcgcttcggatcgggccctccctcgtttgagcgaccgacttctgcccacgcccgagtcctcttttgcccgacggcaagaaaccgagccccaaagcggacacccagcgagcgaacaaagagacgcacaagggacgaccttgaccaggtttcttgcttcggaccagacgtcggaccggtcgtcgatgatgacgaccatcgagttgtcgactgggaagaggcgctcgatcgacttctgggtgaggcctgtcgcaaggggagggggggagagggggggagggagggcggggaggatatcacgctcggggaggagactccgggtcaggaggtgaagatccacgagccggaagaggagattgcgtgcgtcgcgcccacttctttcgctccctcttacgtgccggaccgtccgctgacacgcttcccttgtcttgcgctcgcgggggcagacttggcccggcctgctggctctgggactacctccgccgctcgcgcacccaaggctacttccttccgctcagcggcggcatcgactcgtgcgcgacggcctgcatcgtccactcgatgtgcgtcctcgtctgcgccgcctcccgggccggcaacacgaccgtcatcgccgacgcgcgccggatcgtcggcgaggacgaggagcgcagcgcgtatatcccaagcgacccgaaagagtttgccggcaggatctttcacacgtcgtacatggggacggaaaattcgtcggccgagacgcgaaagcgcgcaaaggacctcgcgcacgacctcggcaggtgcgctttctctctccctctttctctctctctctctatatatatcaacgatcaacccccggccactgaccgaccctcgccgccgccgtcgcagctaccacgtcgacatgaacatggactcgctcgtctcggccgtccgcgacctctttgggctcatcaccggcgtcaagccgcagtacaagcttcacgggggctcgcaggccgagaacctcgcgctccagaacatccaggtgcgcggccgcccagctacgaaccctttggatcgcttcgcttgcgctgactcccttctgtcttttgcggtcggacacgcacgcaaggcccggctgcggatggtcatgagctacatgtttgctcagctgctgccgttcgtccgcggccggcagggcggcctgctcgtcctcgggagcgcaaacgtcgacgagtcgctccggggctacctgaccaagtacgagtgcgtcccccgttcctctcatcctcctccctctccacctcctcctcctcctcctcctcctcctcctcctcctctttgcttcgctcggaaacggtgggctgacaccttggaccccttttcacagctgttcgagcgccgacatcaacccgatcgggtcgatctcaaagacggacctgaagcgattcatcgcctacagtcaggagcgcttccagctgccgatcctcgcgaggtgtgtccgcttcactcccgacaaagccgatcaaggttcggcactgacgctgctttgtggcgcagcttccttgacgcgacgccgacggctgagctcgagcccatcacggccgactacgtccagtctgacgaggtgagagacttcctttcccgactctcccacatcatctcctcctgactgacgcacacctcgctctgcaggtcgacatgggcatgtcgtacgacgacctatcgatctacggccggctccgcaaggtccaaaattgcgggccctactcgatgtttgtcaagctcgtccagaagtggggcggccggctctcaccgcaggaggtgcgtctgtggtcctcgcttcgtgtgcactgcaggcggcgacgctaactctttccttctcagatcgccggcaaggtcaagctcttcttcttcgagtacgcgcggaaccggcacaagatgacgacgatcacgccgtcctaccacgcggtgcgtcctctgcgaccgttcccccttctcgaacccgagctgacccgtctgacgatccttctgcaggagtcctactcgccagacgacaaccgtaagcccccagcgcatcaaccagcacagacgaagctcagctgaccactctttcactgggtgcaggcttcgacctccggccgttcctctacccggcccgcttcccgtatcagttccgcaagattgacgagctcgcagcccgactgccgaaccgggccgcgccgctcctccagatgcccgggatcgaaaaggataaggtcaagctcgactagagggtcggctcgctcgggcttgcggtcgcggcaggtctcacgacagcacctctctcggccctacttgattttcggcggcggcagcagcagcgatgcttgcgctgctggccgcctctcgtccttcttcttcctgccgctgctggctttaccttctccttctcctcgtcctcgatgccggctggccgtcgcgccgagggtcgtgcagtcccgataagaccagccgtggatgatgaactacccttcgcgatggcgccctttttgagagtgcgcaccttcagcatgtgcatcaaccgccgtgcgtacggctgggctgggcggcgcggcacggcggcgacctccgctcgggcggcgcggcacgccctcctcgcccctccgacgacgtccttgacgactctcctgccctcctcgatcccatcgcctctctctagaacgacctctgccttcgctgaatgcggccctcgctcgccttctatcgtcgcttcctgtcgtcgtcgcctgccgctgccactcccgtccctcgcctgaagctctacacgggcggcccggcctgcagcctctgcatcgacctcaaggaggaactccttgccctccagcatacccagccctgcgccagctcctcctctgacagccctccgagaaaggccttcgaactcgaaacgtacgatatccgcaaggacgcagccgacggaccgtccgaggcggccgagcgcaagcaatggcgccggctctacaagtacgacatcccggtcctccatctcgtccggccgggcctggtctcgacggcggcaggggtgaaggcggcggaggaaggagagacaccgtcactgcctggaccgcaggtgcaggcggacgaggtcgagattttccgccaccggctcgacaggcagaagctcgaggcggcgctggcggccgagcaggcacggctcgaacacctgctttaagctgagtgacgtctacgatcgactgagacgtactctacgcatcggaatgcacgttcttgtacgtcttgctgctgctgctcctctcctccttgcagccgttgctgatctgctcctagcaccctcgactcgacccagaccgaagctactcgaagtccatgggcccgagccagctcagccagacgccctccgacaaaagctacctcagcgagacatcgatcgtacacgttcctccttacaggcgaagtaaacggccgtctctgctcgacgggcgccacgtcgagtgcggccggctctcgcccggtgaacgcgcatgcgagcaacctcggccgttttgcgacagcccgtacgaccctccggccatctgccgacgtccgggacgagaacgactgcctagaagcaggaccattggcatccagatcggcccgcaacttgaccgcgtggacgaaccgtacttgagtctcgccaggcggctgagcgcgccttcgactgcgagactgtcggccaaatacggcgaagctcgaggtgggaccgatttgactcgcatgcgagagacgtgcgcgcagggctctggatcgtcatcgacttgctaacgacagcccctcgttctccagtcgcgggctcatcaggccgagctgacgaggacgagcaggctgcgggagcaacaagagagcagtatgtcatggatcgcgcgatcaaaagcccggcccgaggtcgagcacaagcttgcttgtcacctcgccgaagccgaagcggtccgccttccaggccgggagagggacgccgcgcgcggccgaacagtcaggtggaagatcatcgtcgacagcggcctccatgtcgacgtcttgcgagtcggccggctgctggctgcttgaggaggccagacgcggggtaagtcttggtcagtaggagcagaagaacgaagccaagccgcgaacgaggggccgtacgaaggttgctggcctgaggccgtcgcctcgagctttgccttcttgcgctgcttgtcggcgccactggccgcggcctccttcttggccgcctcgagtgcctgccgaaggacctccttgttccgctccttcatccgccagatggcatcgccgcctgcagccccgagcgcgctgctgctcgccttggcgtcttcggcagtcgatggtgtctggaggccactcgtcggccggctcaactcgagcttcacctcgagctcggtaatgttcttggcaagatcgtcggccgcgtcccagtcctggcgcttgagggccatattatattcgccccgccggcggttgagcgcaatctgctggtcctgaaactgtgagcgtgcgaggccgagctccttcttgcgccgcaggttggccgtgatgtcggcctaaggtgaggtagaagggaagcgagggatgagcgggtggccaagtgcttgtaggccctttaggccggtacgtacgtccgtaaccgcccgtcgcttgatctcggcccatttgacgcgctgcttggcgagttcagacttgcgcgggagcaggattcctcctttgctgagcgccctgatccagagccgcatctcttcctgtcctcgagagggtaagatttttgaattagcgccatggccgtgagaaggcatgtcctctggtcgacgaacctgggtgatatctccggacgagatcaaattcatgggctgacccttctccatgtcgccgtgtttgagcgtcagccggcggttgtccttgatatgcggcgcatcgggatcgaccgagtagggcttcggcaccgtcgagatacctggacaagccgacgatgaatggacatcagcgcagaggacagcgcggttcaaggtcttcgagaagcgcaccaagaacctggcatacgaggtagccgcctttgttggagccggagcccggcagcggcggcgcagcgatccggacgtagctgccagtgacgaactcttcaaagtgcgggctgctgagcatcgtcagaaggtgcgcccgccggagtgttgccccctggacgtcggcgagcgagatgttttcggcctcttcggcgtcgcgctcggcctgcagcgtcgaggcaatgtcccgccgctgactctcgtcctcgtccgacgactcgccacttgacgatggcaccgaccggccaggcgaggccgatcgcttctgcgagtgagtcaaacgcagcgtcgcgagctcggtcagtctagatcggtcgagacggaaggccagcaggccgtgccttgactccagccttctttgacttctcgttccgcttcttggtgagctcctcgagcttctttttcttctcgctcgacgcgccagtcgtcgtgtgcttgcctgaaaagggttgtctgcggtcagtcgggtttgtcctcacctggagaggtagttcgcttccgaaacgcacgcttcgctgcgcccgcgacgctgtcagccgcgccggtgccgacgttgcccttctgcgtcgcgtacatcgcatcgagcgcctgccgctcgacatccttctgcttctcggcgagtcgctcagacaggatgacctcgcggtcaacctcagacatggccatgatcctgcgacgggaggtcgctcgcgcttgagtcagcctcgcaagctacctgttcgtcgctccgggtatggcacacgcaccgagccttatccttctcgtccttgaactggccctcgagcgggtagctgttgacgctcccggtcgcacgcgatgaggcatgccgaacgacgccgccgtcgtcgtcttcttcgctctcaatctcgggctcgccgtcgtccgaggccgagtcgtcggtgtcggccctgcgagcccgagaacggatggagaagtcaggtcaaacgtacccgaggtctcatcaagccgctacgacgagcgcgacagccagcctgatgccttcgagctcaagagtctgaagcgagaacgcacgccttgcgtcgcttggacgacgagcctgagcgctgcttctggcccgaaccgctcgacgaggcccgcttcgagggctcgtcaatcaggccgagcagctccgagtcgagatccgtgtccgacatggccgtcctgagtttcggcggcaaagctgagagcgaggtcgtaaggcggatggaaagggcgggaggcggcgaggcgagatgacggtcagacggtacagcagggcagaggcgaggcgaccggacgaaagggattgattgacgcgaccgaccgaccgaccgacggccaccaagcttccgccgcctctccgatttcgacagcctagcgacgatgagcgacatggacgtcgacaagcctgcgcctacggcaggccagtacgtgcgtcgcgagcagctcgagaggccgtcgactcggcgggcgggctaactagagccctcctctccgctccgttcgcgcagacggagcacatcaatcctcagggccgcaagtagtctgtcctggccgccctctcacctggccatgcgactcggcgctgaccttcctatatctgcagctggtacgatacgatcaaccagacgtcgcactgggagaagccggcggcgctccagtcgcccttcgagcgtgccatggcgtcgacgccatggaaggcctacacgagcaacggccgcaactactgggttcacgccgagaccaagaagagcgtctgggagctacccgaggagctcgtcaagctcaaggccgagcacgacgccgacagcgacgttgagatgaaggagccgaagtccgcctttcctccgccagcgccggcgctcactgcggccgtcgcctcttcaacgctgccagtcctagcgacggcggcggcgactcctccgacgggcccgaaggccctcctcagccagtctggcgtctcagctgccatatcgccatcgcatgtagtccctgtcggcgcggggctccctcaaacgcctcacggccacggcttgcccgacggaccggtctcgacttcgggccactcgctcgctgtcgtcccgcacgcgaccacaggcgactcgcaccttgcccatccatcgcctggcggcggacccccgcgcagctctccgcagccactgccgcacgagctgcccttctcgggaccgcctccgcagcatcagcctcgggacggcggcggctggcgcgatgggccgcgcgaccggtacgtcatcccggacaagggatggcagacgctcgagcaagctgaggaggcgttcgagtacctcctgcagaagtccaatgtcgaggcgaactggacgtgggacgttgcgatgcgcgccatcatcaccgatccgctttacaagagtctccatacgctcgccgagaagaaggccgtctttaaccgggtgggtcgctgcgcctcgtcgacagcagtcgatcttgctgaatcggctgaccgctcactcacgtaatctttgtcacagtacaccgccaacctcaaagcgtcgcaggcccaggagcgcgccgcccggatcgaccggctccggccgcagttccacaagttgctcgacggccacccgcaagtctactcgtactcgactttccggacgatgagccgcgagtttgccggcaacagcatctgggagagcgcaaaggaggatgagcggagcgctctctgggaagaattcgtcggcgagctgaagaacaaggaggcggtgagttgaagcgaagagccgcgtcgccatgtctggcaaactgactgtcatgctcgctcgcctcagaatgaacagcgcgacctccgcacgcgtaacctggccgtcctcaaatcgatcctcgacacgctctcaatctcgccgcagacgcgctggattgcattcctgagcgcgctccagcagcacccgacgtacgcggccgacccgctgctggccgagctcgacccggtcgagatcatcgacatgtatgaggatcgcctcgccttcgccgaaaaggcgctcgaggtcgaacgcgccaaggagcggctcgcggccaagaggagcgggcggcacgctcgtgaggcgttcaaggctttgctcgagcagcatgtcgaggcgggcacactgacctggcggtcaaaatggcgtgcctgcctgccgctctggcgcgagacgcccgagtaccgtgccttgctcggcaagcccggttcgagcccgctcgacctcttccacgacgtggtcgacgacctgacgatcggccttgagaccaaggccaagggcgtcgtcgacctgctaggtgcagatggctttaaggtcacgttcgaaacgaagagagaagagtttgacgcggcaatcggcaagaccaactaccaaggcgacgacaaggaccgcgaggaactctgggcgctcgtacgtatcgtccctttgccccaacctcgcactgcgccgccagactgacattcgctctgcttccgcccgagccatccagatgcacggtcggctcgtcgcaaaggcggccgaggagaagcgtcggcgcgagcgtcaccggcagtatgcgatcgacgacttgcgttatgcaatgcgcaaggttgagccacccctatcgctggacgcttcttacggagaggtatgtcgagaccgtgtgcgggcctatcgcaaaaaaggcagcggctgacttcgtccacgattatttctgcagatcgagcaggcgctctccaagctcaaggagttcaaggcggtcgaaaatgtcgacgaccggaaggctgcttgggacaagtttgtccagcgtcagagggtgcgatgctcggttccttgggacggccttggctgttgctcagtggctgattttctctgccgcctcgttgatcaggagaagctccgcgaacgcgacgagaccccttcttcgtcctcgcgcgatcaacgctcctacggccgcgagcgcgactacacgagccgttccagcggcggcggcgagcgtgagcgtcactcgtctcgcgagctcaactactcggaacgcgcgagcggcagccgttcgcggaccgctggcggcgtttacgacgacgaccgcgagcgctcttccaggcgcgagagcgatgccacgcggacgagcacaaggaaagagcgcgagcgcgatcagccgatcgacgagcgcgaggccaaggtgcgccgcctctcatatccgtcattgaggacgaccaacgctgtcgccgacgttggcggtgcgacgtcgattgctgacgaggtcttccctggctgggcttcgcgtcactggcagcgtgtcaaaggcgagccgtcgacggccgatcttgaggagggcgagatctgaagggctggcaccgaggcctcagacgacgaccacgcccgactatctatgctcctcacctcttactcccctccggacgctacgcaagggtcgacctctgcatcttgtcgagagcataagtgctcacagagtcgtggacgcacaacgagttctggtggcgacgagagtccggcggaaactggctctgcgcgcgctcgaaactccgtcggccggtcgaaaaggcctctgagctgctcgacgtcgaccttgccttgtctccctcccttcagcacttcttcgtccggactagactgcctttgaacgagaacgctgacctcgcagactccatgagacggggcgggctctagagcgatcggcggctctgcggccgggcggcggtcgaagacatgaccatggcggggccttgctcgcgtacccggtagcaagcaggttagtctcttcctcatctctccttttccacatcacgccctcctctcctcctcatacggcgcagctcttaagtcctttgtcatggtggacctctccctgccctcttgcttggaagggcggcccgccgtctttccccgagggcatagaaccaccctcagcctaccagttgagcattgactcagctcgggtcattactgcgccagattgactcttggctcctcgcctttcccacgccgccgtcttggcggcgagggtccctcggggactggcaacagcacccgagggtcggtcttctttccttgggaggaggatcggggcttggaccgtcgctactcacttgcggcgtcctctttcttgagggttcgtcagctaagaggtcgccttggggtcgaatgggctcgggagggtctctcagggacccgtcttcctggccggcccgttcctccaaggttttgcggacattaaccccccgactatctcgtagtctcgttgctcgctcgatgttctgcatgagaaccttgttctatcaagaccggctctcctgcaaattctgctttgatcttgagtcgcacgctggaagacgagtcggtcagcagtcttggcatgtgaagacggttgtcgtgcgccgttaacggttgcctctgctctcgtccctccgcacgctcctgctcctcaccaccaccaccatcactaaccaccactgctccaaggggctctcgtccgcgtcgcagcgtcaacaccgtcagcttcctccgcccctgcgaaccatcaacacccccacgatgccatccgacctgccctacgcggctgatgctgaagagtcgctctcgcgcgaggagctcgacgtcctcaaaagacagtacgagaaggagcaggcgaccggccatgtctcggttcaagtgcgtgccctggcccgagccggtacgaacgaggtcgccgactcggacgactgaccgtctcgtcgtcctgtttgcacccagactcgcttcaactttgcctgggggctcgtcaagagcggcaacaaggaccttcagatggagggcgtcacgctcctccaggagatctacgcggccgagccgctccgtcggcgcgagtgcctctactacctcgccctcggctacttcaagctcggcaactgggaccacgccaggcggttcaacagtgcgtccattcgatcagtcgtccagcttgccctgcccttttctcgagccgtccgttgtcagcgccctgcttggcccacagagctgcggatcaagcgagctcagccgccttcctcttgcagctcgaccttcgcttgtagcttggagcatctcgctgacatcctctcctgtctttcgccgccagacctgctgcttagcaaggagccgaccaacctccaggctcagtcgctcaatcagctcattgacgacggtctccgcaaaggtgcgcgcacccgaccgtctcgcctcctgtgccgccgctctcgcggtcattcaccgccggtctccaccgcttcagctcgaagggcagccggactgactcgtaagtcttatctccttgcttgcagaggcctaccagggaatggcgatcgccggcggagcggttgccgtcgtcggcgtcctcgtcggcggcctccttcagctcagccggcgcaagcgatagaccgcggcaagccgccttccgtgacgtgtccggccgcaatttgagaggagcaagtcttctcgactcgagccggtcaggccagtaatagcactgttcatccgagctcctccacttcaccccgcccgcccgcgttcaccaccctccctcgcacctcacgaagccgttctcacttctgcgtcccctgcgcaaacccgcccggcttaccaacagcagaaagactgctcttatgttgtaccattaaaccttcctggcgtgatcgcgattcggtggtgccacagccctccccggcgacaaagttacctgacggagggagaagtcatggtcgagatgcacggtcgtcaggggcagagagaagggagagaatagaagtacatgggcaggcggcaggcgtggtaagggttcaatcgccttcgagcccaacgacaggtgagggagcgattccccgcgaggctggtcggccgccgctcaagcctgaaccttcgacagcttaagccgcatctggtagccctcgtcctcgcggcccttgatgagcggccgctggacgagcgccgtccggtggacatatgtcagagccggagtcgcattatcaaactggatgctgcggaggaggacaaagaggaaggccttgatctcgaggagagcaaagcgccagccgctgagtggaaaacctcgacgtcagaaagaagttggcaggacgaagagaagcgagccggcgacgtacatgcagcctgtcagagaccggcggaaaaggaggcgggtgcgatcagagaaagtcagtgctcgttctgcgacaagcgtcaagggagcgcacctcgaggcccggcaaggaaggtggctatgtgcgcccagggcgcctcaatccccttggtcgccgtctccggaatcgtgccgtcgatccaccgctcgggcttgaactcggccgcgtcttcgccccagatctcgggggcgcggttcatgttgaggatgccgacaaagacggtgtcgccctttgcgacggtgatctcgttgagcttgttgccatcgcggccgatgattggctcgctgagcgggatgacgtcgtcctcggccgccgtccggaccgtgttggagacgggtgcgttgacccggaggctctcgcggacgaccgcatcgaggtaagagaggccttgcaagacgtccatctcgggttcgaactcgggcacggccagcagctccgcccggagccggtcttggatttccgggtgctcggcaagaagatggagggtccacgtcaaggcggttgaggaggtctcgtaaccggcaagcctgggcggtgcgagcgacagcgtatttggtcagggcggcgtctgaggcagttgaaaagatagcgagcgcacataaatgttgtgacctgggcgagcacctcggcgtccgttaacttctgcgaggccgcaacgtcggacgccatgttggcccggactgactcgagcaaagtgcaatgtcagccgatctgcgataggcgtgagcgaaaggacggtagatgttgagcgcactgagcatgctgatgacgtcccggccctcaacgtctgacttggtgacggccttctcgcccccatcgttggcctcgcgtgcgatggccgctttggccttgccgatgattcctttgccgacacggttcatgacgcgcacgctggcctcgaccgtccgcttgcgcttggtcgggatgagcgcgaacgggaaagggacaaaactggcgaggatgccgaagaagttgatttcctgcgtcgctcggaacatcgacttgaaggcgtcggcaagctcgttctcctgttggtcggcctcctgcttcagcgcgccgaagtcgtagttaaatcctgggtgcagatgggagtgaccgtcggggttcagcagcgcgcgttgggcgcaagccagagctagatacggaccagccaggccgatgacatcgagtgtggcccggccgagtagagccatgatgtcgatgagcccgtcgtccttgtcaacgtcggccgagggctcgctcatgcgggcgaaaaagactgtccgaagctcctcggccttggaaaggctgattgagcgcgaaggacgagagaagaagtacggttgcggtcagtgaggggaggcgagacgtagcgcagggcagagtgaaagggtgaagcagcgcacaagatgggcacgagcggcttgattgagagagccgaaaaggcagggctgatgacacgccgctgccgcttgtggacgtcgcctgttaggttgtagaagcagagagccgaaaagcactgcggatcagttcgagctcgctcgacgaggctgaaagagtgcgagcccgacggacagaccttcggtgacaagcagaccgtcgccgagcatcttggcgagctgagcccggaccatctgcggctttggatagcggtaggcatgggcgctcgacatgatgctgaggtgacaggaggagcagcagcgcagggtccaaagtcagcgcctcgcaccctcgcttgcattcgctccggccgcccgaaagacacagactgattgaaaaagcgaatgtcggtcgaatagatgcgcgattctccgccaaaggccgtgtagcggaaggtacggccaaagagcttgctctgagcgtcgtgccagacacctggctcggcggcgatgatcgagggcaggttgccggtgagccagttgtcgggctcgggacctgcggtaggtcgggcaaggcgtcaggaacggtgcgctccgagcttgctcgtgttttgagtgagacgatgagagcgagctgcgagcaggagcggaatggacggaccatcgatgatccacgaaggtgagagccaggtcttgaccttgagccggtggaagatggcggcaccgagcacgagcaggacaacgccgccgagagcgagtcgcgcgtggtgctcgagctggccgacaagggactgtacgatggtttccatactaggcgttgacgtcggtcgatctcgaggtggaagccgtcagaggggaagggggcggcggcctcgcggcctcgcagatgcccgggcgatgcgcagcagtctcctccgacccccgccaatggcaacgaggcggcactacatcacctgcgagtaaggtcgtcggcattgacaggaaagagcggctgctaagagcagcatagtagaggagccggtgtcgtccagccaggtgggggacaaaggcaagggaacatccacggcccgctattgaccccgacgacggcgatgcgcctcgagccttgcgctcgacgactgccagtgaatagtcgaccccttctgcgcctaagcatccgtctctgcctccttcagtcgacgacgacgtcgagccactttcgtcccttgccgacgccggttgcttgcctgagctcgctcgcgcgtatgtccggccgcggccgatgctggccatcaccctcaacctcgtctagccctggtccgagaccgcggaggactagcatgtcgagcgctctccactggagacgccagtcgatggcatctggaccggcaagtagggccggcgtcagacgagggatagtcgatgacagatcgaggtactggtcgtgtgtagaggcccgttagagacgctcgcgtaagcctcgaagatttccgcggcggacgcggtcgacagcaaaacttggagaacgcacccggaggagcggcgtcgctctcgcaagccgaacgagcaccgccttaaccctcggttcgatacccggcccgcgctcgtagccctcgggcacgagccgaacgccggcgagcgagagcgcccggagatggccagggagcgggagggcaagcaggcgctcgaccgggagatgggcgtgggcgagtgagaggtgtgttacgggcgatacgacgctggcaacggctgctttgaaagacatccgatggccggcctgttgctgaggcagaggtgagagcaagagacggagtgtcgacggcggtagtgacgtggccgggagataaagagtcggccaagcttgactcctcgagccgaagggcgattcgccaagtaccgaactgtctgagccggcatcccagtcgtcatcgccgtcgccttcgtcgatgttcttgccggaaccagcagtgagatcctcgccgtcgtcgtcgtcgtccgcaccccaatctctcaagtcccacagcagagcgtcgacctcctctggccgaaggccgcgcccgagccgattcgggacgacccagacagcgagctcgcgcaggtgtcgcggcaggctggcgacggcctccctggccgattgcgcggccggtgtcacggctggcgacagctgccggaggaggacgagcaaggctgagagaagcagcctcggcggccggctcgagcgcgtcggatgcagctcggaccaggtcggtgcgagatatgccgtcgtgaaggagtcgagctcggccgggagccgtcgctcgatagcggtcgaggaggcatccttgccggcagagcccaagagcacagctggccgagtagtcgtccacgagcgcggtggagggggaccaggaggtcgacgaacgacgccggccggtcgatctcgtcctctggcaagctcagaagcagcctcctctgctactcctgctacgagcaggtcgaacagctgcggtgaggccgccgtcgacacatcgatgctcgtgctcgcgacgctgccgcctccgctgagcctcgcgagggtctgctgctcgcgcgcgcgaatgcggtcgtgagcccgatggaatgagagggcctcggcaacggtccgctctggccgtggcctggctggtcgcggatcgacgtcgtcagccgcttcgtcaagcagcttgcgccaagccggcatcgctcgtcgaggttggatggaggtcgagcgactgacggcaccaggcgagacgcgccagtcttcagcgcttcagcccaacctgtcgttgcatgcaacttaaccatcaccttgacacctcgcctagctgctgtcctgctctctcggccaggtccctgccgatcctttcgcctcctttctacttcctcgcggccgcctcgcgccttgtcctgtccttggtcccggtcccttccagtctctggtgcgtcccccgacctcgactcgcgcctgcgcttgaagcccgcccgctgacgcaccctccttctgctgaagccctctctgctctcgtcggtcgctcccactcgacagcctcccctctcggccggccttcctctgtgatcaacctccggctcctctcggtaacgtccgtctgagcccgtccctcccccgtcattgctgcttgtctgtcctctttattgccatgtgatgccctgccctcgtccgaagaccggcggcgacgacgagcgcgtccgacgcacgaccaagagagcgaccgggcgaggacaaaagaggaaggctgcgcgaggtatctcgcccgggcgcagccagtcctgcttcaggcagggtccggccagcgccaaggacgatccgagggtcgacggatcctgccgtctagaacctgtcggtcttccagaggtcgtcgccgagatagtgggcgagctcgatgccgacgcctttgctgcaaagaaggaagggcaaggcagttgtgacagagcagcaaagcggtcagccgagccggtcctgccacaactaagcgctcgagagacctaacggagcagacgtacttgaccttcttgatctcttcggtccccatctcgagcgtgcccatcccgaccggcgcctgcttgccctcggcaaaaatggctaccggcgtgccctttgcgagggcgaccgaggccggcgggagcgagccgccgggcgatgtcagaccgggacacatcatgttggcaccctaagaagggcaagaaacagcggatcgtcgggaggagtcagtcactcagagcgtcaagtcagtccgattcgcgcaaggctatcggcgactcaaagaggacgcaccgccagcaggaagcgaatcgcgccccggtcaatcttgacgtgcggcaggaggtccggatagcgctggagcaggcgcagtgtcggaaagtaggcttcgtcgaagtgctggaaaaagagtggttcgccgttgagggcgtagatcgaacagcggttgtggctgaccagagcaaaaggacgggagagagggtcaggatgggcggcacaacttctagagtgccagccgagcaaccggcgtcatgaagggcggtgggcaacatgtgcaaccgcagcttgttgagggcctgccgacctccttacccaggccgtcgcgatctccccaagccgtccctcctacccagtaggctattgtgcgtcgacaagtattcctccctccgagatcgccggcggaggcaggcatgcgaaggacgcaccacttgatcagcgtcaagccctccttcttcggccagatctggtcgagcaggctgccctcctcggtcccttcgccctgcgcgagcagcggcatctgttcgacgacctttgtccgaatctggcgctggaccgacgacttgatggacgtctgaccggagatgtcctcctttggcttgaacctgaggatcaggacgacaggtcgggaggggctcagtaggccctcgcggcgggcagcggccgagaggagcctctctcgtctccgcgcctctcaccgtcgtgcgacagctccagagctcgagagcggcctcgtcctgacgtactttgtaaacattgctgcaagtcaagtagggttaaagttatagaggaagaggaagaggctcgaaagcgttttcgaacagcgtcggcgggtcccgctgtggccgcctgcgcgcgcgcgcgggcgagaaggtcgagccaacttcggtcgtcgtcctggttcctgaccctgaaccgccaacacgtcctcaacttcaaagctacaagtcatgggacgtctcgccgaggcgcagcgcaagctgctcgaggtccgtcgcccgcgattcgtgcgattttgtcgcgccctcgtcgtggtcgaggttcgctgacagggccgcgtaccctcgctcgctcctctgccgccatccctctttcgccatgctcgccagcaaatgatgggcgccgagtcgatgggcattgtcaccgtccagctatcgttgacggatgacaaggtctgcaagaactacctttgcggaacctgcccgcacgttgtctttcaaaacacggtacgtcccgtctgctcctcggcttcgccggctcggcagctcggccggctcgagctcgagagggcgactcgtccgctgctgcctaccgagaggcatctcgttgtagccttgcatggtcctcccgctcgagcgcagctaccgctcgccacacgccggctgacaacccttctctctctcttgctctcgccgcatcgctcgccccgctcgccgtagaaaatggaccttggcccctgcccgcgggcgcaccaggagaagctccagatcgagttccagatgctcaagctcgccgagcccaactcgcccgtcgtttcccggatcgagcaggagtggcacgccaacctctttggcttcgtcgacgactgcgaccggcggatcgccgccgcccacaggagactcgagaagacgccggaggagaatgcaaagacgacggcgctcgtgcgtacccctacctcccttctggcctcgaggtcgagcgtgccggaccggctcgactccttggtcacttctggactaggacttgacggctgatgctttggcttttccccggttgcagatgcgcgagattggagagatcgagatctcgatccaggacggcacgaccgagattgagacgctcggtacgtgatctctttctcgaaccaacgaagcggaccaggctgaccctgactcgtccgcgcgcgtgtgacaggtgaggccggaaaggtcgacgagtcgatccagcgcctggcggcggtcgaagcgctcaagctcgagaagcacgacaaggaggtgcgccatcagctccctcatgacgcctgttttccgttcgtgctcagctgactgacccgactaatccttgcgccgttcggcagagggagctccaggcgctgaccgacacgtctggcgcgtcgggccaccagaagctgcgcgtctgcgagacgtgcggcgcctacctctcgatccttgactcggaccgccgactggccgaccacttcggcgggaaggttcgtcctagctaactcttgcttccatcaatggtgagcgtgtgctgacgcgcggccgtttgcgctccgacagatgcatctcggctacaaggagctccgcgacctgctcgtcaccatcaacgaggagcgccagaagcggcgtgcgaaccctccgcctccggcaccagcgggaccggcagcagcgtcggcacctcctccgccgacagggccgagtggcggcggcggcagcgggggttacggcccgcctccgccgtcagggccgtcgtcgtcatacgaccgcgagcggtcaggagaccgctacggcagcagcggcgggggaggttacggcagcagcagtgccgctggaggccgggggtacgacgaccgggaccggcggagtgccggcggctatgccgccccggcgggcggccgtggctacaggtttgtctcgtcctcgctctcgcttgctagcgtcttgcgctctcatgcatcccatactaccttcactgaccctctcacattacccgtccgtcatgtccagccgtgaccggtcgagatcgcctggacgcggcccgccgagcggcgtgggagcgcgctactaggctcaaccttgctttgtatcatcaactgcccctcctacgggtgctttgaatgcatgacgcccgcatgctcatgcccatcgccgtctgctggcgagagtctgtgaatcttgagagcgagtcgtcgtcagagtgcccgtctgcgtgttgcccctctgtcgttttccgcttgcccgcgcgcgcgcgcgctggctgctccttgctcctccgccgtaggctcacttccaaacctgctctcgctttccttcaatcgcaacgaccacgaccttcagcatctacagcacagaccttgagcaactcttcagccggcacccagcacctctctgcaagcccctagctcagcacacgccgacccgccacccgttacgacctcgcagcacccgcagttttccccgccctccctaccaactcctcgtccgggcccacagcagcgccagcagcccaccccatccccttcgcagcacccatgtccagctctgcaccccgcacgaacggcctgtcgtcaagcggccagcacgccggcaagcgcacgctctcgctctcgatgtcggcggccgagacccaagcggccctgtcggctgctcagggcggtaacggcgccggcgggccggggaaggaggctggactccaccccttgaagcacaggtgcgtgctggtctccgaggcctgaggctggacgcctacgtgctcgtcgagagaagtatagtagctgagactttccttcttgcgctgcttcatccttgctctacaccatcccgctcttccggtctgctcgacctgcgaccgcccacacgacctcgcccctccccgctgtcggtccttacgctcggccgtgtctgcagctgggtcttctggttcctgaaccggcacgttggcgagaagatcgcctcgccgagccagtacgaggagagcatcaagaaggtcggcggctttgcctcggtgcgtcctctctctcgcagcgcgctcttctccgagcgaagtcgagcgccttcggcaaaagccccccggccgacatgcgaccttgagatttgaatcgggaaggtgcatcgctgaccacctctttgcttttgctttgtgctctgcccggtccatttcgacttgctctctcacgtgctacccgccgcgctctcgaccacccagatcgagtccttctggacgatctactcgcacctccattcgccctcggccctcccgccggtgaccgacatcctcctctttacgtctcagatccgccgaccgatctgggaagaggtccccaagggggccaagtttacgatccggctccgcaagggcctcgccgaccggctctgggaggcggccgttcttgccgcagtcggcgaccagtttgaagagcaggacggagtcgtcggcgtcgtgctgagcgtgcgggctcaggaggacgtcatcagcgtctggaccgagcggagctatacagacggcggcgcccgggtcaagtacgtccttaccctcctcacgtcgactcgctgccagaggctggacagcatgaagcactcttgcagcggtacgcggttgctcgagagtcttctgctcggccagccagacagccgcaacccaacggcatactcgtgcgcgctacctagacttgaaggctgaccgtctcctcccctcgtccttcctcccagggacacgatattccgcctcttgaacctgccgccgagcacgacagtcgactacaaactgaatgtcgagtgcgtcccaccccaactttagattaccgcttgcatttctgacctcatcgctctttgccttgctccgcacccctcgcgaggcggcacgggcgcgtcaggcggcgaccggcttgagcgcgagcactcgcacggcggccacagccggcatggcgggtcgcaccgagagcggtcgagcaacggccatcggcggggcgagcagcagcagcagccgtcgtcgcagcttgcagcagggggcgatctgaacggagcggccgacgggggcgagaggcggagctaaggctggcaaccccgacaagagggaatagttttttctcgcttgtggatcccaaggcgttcgcagcggacactctgggcggtctggtcgaagcgaatcggacaaaaaggggagggggaggtcatgaggtcgtcattagggctttcgagtggaggagaagggcccggctcagaggccgagctggtcctcgaccgacttgcgcacgcggcgctcgtactcctgcattccgtccagtcgcacgcccaacgggtcagcgtcgcgctccgctcgtagtagcgcaggggtgggtagacgcacctcgcggtcgtcgcggaagagcttgcagcagtcgatgttggcgccgctctctacgttgggctctatgtccaagcacgagcgagcagaagggggcagcagcaccagccgtcagcacagcagcccccaccctcccccgcgggccaaaactccaagaggccactcaccagcgagcatcgaaatgaccgacagcagcaccttctcgacgctctggactggactccagcgctcgctcgacgtctcgtacatgtttgggtcgtcgccgggcgcgtggaggatgctgatgcagacctggagtgggccggagggggggggggttgatggacgtcagacttggaggcagacgttcggcgctgttgagggctgggacagacctcgccgttcgcatagctgcagggtaaggggtaatacgtcagcgagtttgtcgtaccgcggtggccctgcacaaaacgagagcgtacactgcgagcggaggaaggaacgagcacgtcagccctcgagtagatcgggagctgagctcgtcgctcagccggcagcggctcaccgttcggatggaggatcggcggatcaaacttcatcttgaaaggcgacatcgggtagtcgctcggcttaccccgtcaaagcgctcaggttaacgctcgccttgtctccgcgccctcgcgccgcagatgaacgctagcggaaggaaggtggggacgtacgaacgagagcttggcgagaaagacgccgccctcgaacggcgtctcctcgggcccttggatgagggcctcccactcgaagaagttggactgcgcggggcagcgccaagggggagagggggtcaggttgaggggacgggtgggaacagccgcgcgactctggggagagaagggcgtggaccgtccagatggggggagggactgacctcagacgttgggcctggagaagagacgaccatcggcagtcgccgtcgcagagcgagagagagatcgaccggtcagccccagctgcctgccagcccaagcccaaagccgagcgagccccccccccccgcgcccgcgcgagctgacggcccgagcgctctgctcgctctaggcctcgaaggaaccgacctgctgtgaagaggccttcgggcgcgcctgatgaccggccgggcagaacattaaggcggggagcagcggagggaggacacgcgaggggggaaacgggcttcagctcaagcgcaccctagcaagcagcttgcggtaacggagagtcgagccagacgcaccagacgacgtcaactgcttgtatctaccaccggcagcagcatcgggcggaacgaggggcggcaagagggcggcgatggacaagcgagcgggcgaggtcgagctcgttcggtcagcccctcacgcgcgatcaggcgaagcaacgagcctccccgcatgtggacgcactcggtcatcagccgccggacggccgtcgacgaggttggcttgagggacatgggctgatggtatccgcgataaagcgagtgatggtcggtcgagctcggtcgcccccctccgagctcgcaacgctcgaagcacacgcgcagcccgacccaacctcgctacagagcccttgccctagccgctctcggctgcttcatgcgcgagaaggttgacggccggcggtgatagcgacccgctgttgcggcccgtccactccagctgcggcgtcgagcgcccgttcactctagctgcggcgctgagcagaggaagcaaggggaacggtcgtctacagcagaggcctctcttccaccactgccgtcacctcccagctcgacctcggaccccttcatcccttactcagctccctctatctcagctcccagagacgtcgagcaagggatcaagcgtccccgacctcgagcgaccggcaccgacgcggctgccaacgcttgacgtcgcgctcgctgctcgggctcaggtcggtccgacgcctcctttctgcctccacctgcgcgctctgactcgcagctcggcaaggctgtgaagtaaaggacgcgtccgaggtcagccgggaattcacttccttgcaaggaggcgctctcggtcgattcgggtcgggcggcggtcgagaacgcctcgctttcgcaccgatgatggcctgccctggctttcggtgcaagctgtcgtcgcagcgagccgggtcgaaacgacgctggattctccgaggggtgattcggaaatagcccctgcgcgacgaggcagtgcagggtagggcagaaccgcgcgttgtcgatcgcccgcgcgtggagagaggcagtgcaggcgagcaccgtttgggaacccgcgcctgcagcaagagaagcagcaggaaggccagccagcagcagctaagcgcctctaaccggccgtgattgctgggtgcattcgcgctccatggagcagaggtaggcaggagcaggagctgctgcacagcttgacatcgcaggaggaggtcccaggcgactgggcccggacacccgatctccttcctcccctccctcagcaaggtcatcagcagccgtctgttgatgctggcctcgagctggttctgaggccgctcatcctcgctgaacgggtccagcccctcggtcgatcggtcggtcgggtcggtcggtcggcagccaggggcgggcagcagcaggcagcacagcaagagccagccagccagctgaagtggtccctcctgccaagccgccgacggtcggtcggcgagtctcagccaccagccacgctgcccgtgcaacctagcacagcaaacaggcagagagacggccaggccgacactggtgccggaccaaacagaggcccgtcggttcggccctatcgaccgcgcacagggacgcaggtcaggcgcctcgcccgcggcctgcctgcacccttccgcggacccttcctgactggcaatgaagaacgacgcagggcgaggcggccgggctagaaggtcctataacaggtcgcccgttggccgtcctcttggctcttgtcttccccaccaccgcctcccccgcccttctcccactcaaccaccgcctcctcctcctcccaagcccgaccaaggctctactaccctcgtcgcacgccccatccggaggcccactacctcaccatgtcggaccccacttaccacctccgcaaggtcgagacggacaacacgtcgttcatgaagggcgcggccccgccgcccaagcgatcctacactaagtcgtcggttgccaactcgcacgctcgtgttctcgccgagctccggtcggacgcacctgacgtccccaagtcgatcgagaacttccggacctgttcgtcctccctctcttcccacgttctgttaacttggccgacgatccctcttgactaacatcacctctccttgcactaaccaccagacttcatcggcatctgcctctgcatgggcgccgttgcctacggctacgacacgggtttctttggcggaacgctcgccctccagtcgttccagaaggcctttggcatcaccaaggcgacccggcccgtcatctcggccaacctcgtctcgctcttccagggcggctccttctttggcgccctcctccagctgccgatgaccgagtcgaagatgttcggccgcaagtggtcgatcgtcgtctccaacgtcatcttcattgcttcctcgttcctccaggtcttcgctgtacgtcgccctgactgcctgtctgctttacgatcctctcgactgacattctgctgctttctttcagaacggctccgtcggtctcttcatggccggtcgcttcctcggcggtctcgccatcggtatctcgtcgctcgccatccccgtctacctctccgagtttgccccggcccgcattcgtggacggctcgtcggcatgtacgacatgggcatccaggtcggcacgctcgccggcttctggatcaactatggcgtcgccgccacgctcccttccaacaagttccagtggcagttcccggtcgccgtccagctgttcccggccgccctcctcgccgtcggcatgctcttcgtccccgagaccccccggttcctcatgtccaagggcaactacgagcaggccgagaagaacctctccctcatccgcggcctcccggtcgagcacgagtacatgcagtgggagctcacgcagaaccgcgaggcggccgaggccgagaacctcgtccggggcgacaccagctactggcagcttgccaaggagctcttccggtcgaagggtcaccgcacccggctcggcctcggcctcgccctcctcttcttcaagacgttctcgggcgtccaggctgtcaactactactcgcccatcatctttgagcagcttggcttctcgggcaccaagaactcgctcttcgccaccggcatctacggcaccgtcaagtttgtcgcgaccatcatcttctcgttcttcgtcgtcgaccgcatcggccggcgccgcccgctcatgttcaactcgatcttcggcggttgctgcctcatcttcctcggcggctacctgaccggcaccggacccaaggccgagggtgcgacccgcaccgccggcgactacattgccatcatcgccatcttcgcctacgccgccgcctactgcttcggttacaactcggtcccgcttacgctcatctccgagatcttcacgatgcgcttcaagctgctcagcatgtcgctctgccttgcctggcagtggctctgcaccttctcgatcgtccgcatcatgcccgtcgccctccggaccatcactacccggacctacttcatcttcggtgtcatcttcctctcgtcgaccatctttgtcttcttcttcatccccgagaccaaggtacgcccgccccgccgccgcatgcgcctcccatgacccgacgctgacctctttcttctctctcaccttattagggcctgcccctcgaggctatggacaacctcttcggcggcatcgagcgcactgacgccgaggcggccgtccttggtgtcaacgagctcaagcacaagaacgacggttcgtccgagtttgtcgagcacgccgagcacgactctggcgcgatcgcccggaccggcacgctcgccaccatctccgagcgcaagtagagcaacccaaccttttttggctttcactccggtccatcgccgacaaaacgcaccgccctcgcctttcctcctctctctctctcccttgtacgccctcctccagcctttgttggtctctcctagcctacttagccttccctcttctttcgcgcggtgtaccggatctctccctttctcccttttctctcgctccctgtacttttcgcccacctttttgtaccggcccagtcaagccatctatgccgccttcgtcgatgacgatcgatgtcgcctgcattgtaccttttctcgtttgagcaagctttccccgcctcagattcgctgaggggaggtactttgaagaccagcagctcgactcccttcgcctcccgatctgcactgatcctacgcctgacagcggttcacggagtcgggtcatctcgtgcagggaaagaaacatgaaagaagagtagcggttaccacttccggaccctcggcgcggctggcggcggtggaggaggcgccgggtgacgaggaagccgcgatgcgccaggtggcgagcgcgaccggcggcggtgagcgtgaggccggagcggcagtggcggcgacgctggcggcctcgccaattcccagcgccaggcatggtcatctaccggcgcagagcccgactgagcgtccggatggtagcgagacgcagggcgctgccagtcgtcgcgcccgccaccgtggctcggtgcggcagcgggcgcggcccacttcgtgctcgtcggccgccgggcgtcctcgtctggccgccgatcgaggaaccggtcgtcctcccagcgcccaggccgctcccagcgatcgtgcgaccgcggccggccagtcgaccaagagtcgaccgggcctgacgcagagaggcgggccggcggcgcacggtcgtgctcccagcggtccgtcgacgctccttgcccgacaggtcgagcattcgaccgtgatggcgatggatgatggcgagacggcggtggcatggcgcgtttgtccggcgagccctcgggcggcggtggcggtggcgagtctggcggcggtggcggcatcgaaccgacgaacggcttaacgcctgcaggctcgtttgtcgaacgttccggcagcggcgcgatgggccggtcggttgagtggcctggccaggccggcatgcccgccggcggtctgaaagcaaagccgtagcttccgccgccgccgccgcgcccctcctcgtcggccggcagacggttggcaccgccggctcttgcctgctgcaagttttgccagacgcgtcgccggcggtcggcctccgactccatcggcggcagcggcctggggtgaccatcgccgagcctgaaggctgggaggagggccgacgagaagagcttggtcgggaaggtcgcccatcgcttcgggttggcagcagcctcgttagagtcgggtgaggagccggccgagcgttcctcaagctcctcgccgtccacttctgccgaggcggctgcatcgcctgcgacgatgtcatgccggaccgagacgttgacgtcgagcgtcggatgggacgtcggcacgtcggccgagtcctcaaagacgaggaggtcgggcccatcgtcgccgtcgccgtcgtcgatccgatcgcgcgtcaggcgccggctcttgatcgccttatgcagcgtcgcgcgagggtctacaacgaggagcgaggagagagccaccgggtcagtggagttcctgcgagggcgctccgaaacaaggagtgaggggacagaccttctgacgctatccagccaggcgggtaaccccaccgaactatgcccttccagatgaagctcccagcttcctcagcgtccagcgactggcccccggatggccgctgcttcgcggcgtcttcagcgctagcgacagtcgacactccatcctccaggagggcctcccttagcgcttcgctcaggacaccgggcgcatgcgtctcgagcatctcgagccgccactcggtctcgacgaagacgtcccagaaccggccgccggtagcgagcggcgggcggtcgtcgtccgagtcggcctccggggcagggcctgcgagaacctcggcctcctggcggagcgcctcatgcgcttgccgagcagcgatgatccgggcgcgcgagatgggcaacgggcacgaagcgatgatgtggtcggcctcgccgcagttgaaacaggtcctgcacgttgtaacagtcaaggggatgtcagcgatggcttctcacacagtgcatggatgcgcagtgatcgcaccttgttggaagcagagcctttaaccggaggcgccgcggctgcttcttgaccggagagaccgccagcgggcccgagccctcgccgaccgcgccggctgcgagcgggagcgcgtcgtaggcgatcgagagccggtctcgagtggcggcggcgcgccaggtcctagacggaggggacagcttgccggatgacgacaatgttgaggacaccgacgaggatggtgacgcggcgcggtcggatgcgagaggccgatcgccgagacagtcaaccacccaacctccaacctcgccctcggccgctgctgggaccacgactggcgttacagtcggccgtttcgtggagtctgcgagccgctcgtcctctctgtcgaggtagcggtcgacctcggcccatgactcgccctcccatcgggcaccctcgccgcgaaggccgccgaccggccgccacgactcgaacgcgtcgaatgtctcctggaggacggtgaggtaggtcgcatgttcggcggccgaggaaaagagcccatccgaggagccgtccgaggccgtcgtcgagccgaggtagtcgagcgcggaagggaggaagaagaaggaccggccgagcgcgctccgccagggcactggccgggcccgtgcaggcagcccccgcgatgcgcctgacggagcaacgcccatggagggactcgacgacctgctcctgccgcttccgtgaaggacgtcgtcgcgtgaaaggcgacggcgtttgacctcccgctcgtcaccggacgactgcgcgtcggacgaggtcgcttgcttgggagccctacgggaaggtggctggacagccgaggttgttgaccgagcctcaaagaattctagctgagccgaaatgcgcgagatatccgacgacgctgagctgaccgacgctgaacctacagggcagaagcggatgaggcattagtgacaagctgagagggtacgagcgctcgcaagccagagacagcacgtacggaagcgcgtgtgggagcccgataaggatggctccataggctgcggacgctccgagagagccggggcgggctggtttgacggccgctgaggctcggtcggctgctgccactccgtctctcttcctcgccgatactcgccccagccggtcgacggcccggcaccgccagcagataagctggtccggctgccgctactaccccagccatcgcgaccccagcctcgactaccacttctgctgctggagtggccggcgggagcggtgacgctcacagcgtcgtctacgccgagagagggtcctcgagccgtgcttgctcggccgccagcgccgcctcgagcttctgcctgtcgagccggtggcggaagatctcgacctcgtccgcctgcgcctgcggtccaggcagtgacggtgtctctccttcctccgccgccttcacccctgccgccgtcgagaccaggcccggccggacgagatggaggaccgggatgtcgtacttgtagagccggcgccattgcttgcgctcggccgcctcggacggtccgtcggctgcgtccttgcggatatcgtacgtttcgagttcgaaggcctttctcggagggctgtcagaggaggagctggcgcagggctgggtatgctggagggcaaggagttcctccttgaggtcgatgcagaggctgcaggccgggccgcccgtgtagagcttcaggcgagggacgggagtggcagcggcaggcgacgacgacaggaagcgacgatagaaggcgagcgagggccgcattcagcgaaggcagaggtcgttctagagagaggcgatgggatcgaggagggcaggagagtcgtcaaggacgtcgtcggagggacgaggagggcgaacctcgccgcccgagcggaggtcgccgccgtgccgcgccgcccagcccagccgtacgcacggcggttgatgcacatgctgaaggtgcgtacttttagggagggcgcaccgcagagggcagatgaagcgtctgtctgcagtgctcatatcgtgacgaagatgctggcgtcgaggtgaccttctatcctgggcgcaccttgatgccagcctgccaccctgctttcctcaagcctttacggtcgtttgagtcagagcagtcgtccatatagcagtacatgggtcttaaagacggtcgtctactgaggagcgtcgtcgggcacgacgacaacattgacgaagcctccgaggttgccagcgacgctctcgaccgcctcgtttaccttgtcgagcgcgaacgctttcgtctcgagccacgagagattgacgacgcccgcatcaaccagtccgatgagctcgtcaatctcgccgtcgtaaaagaaattggagccaagaacggcgacgtccctcgtgaaccagctcgagtaggattggctgatgtcgccctcggtcgcgtcggcgaggaggacaaccttgccgcctggtcggacggcctgccggaggagggcctcggtcaacttggctggcccaccggtaccgaggcagtcgatgatggcgtcgacgccttcgccgctggccgtctgctcggccgcccatctggccgccttctcgggtccttccgagttgatcgagcggtacgtctggacgcggctgctgtccttgggcgcgagagccatgacctgagcgagtcgctcagtgctgcggccgatgccgaggattttgcttgctccgaggccgagggcgatggcgacggccgcgacgccgagcgagccggtgacgccgttgatgagaaccgtcttgcccggaccgacgtcggctttcttgagcgctgcatacgatgtgcctgcatagccgagccgggaagctgtctcgagactgatggattccggtaggagcgcgatcttgctgtcgggcgagacgacgtactgcgacaggcctccgtaaggatactggtcgagcagtgctttgccgagcgggccgatggcaaagtacccacgtaggcaattgctcgggcagagatcgcgccggcccttccggcacatcgggcaggcaacacacgagagagatgggttcacataaacgcggtcgccgaccttgtgatggagaacgtactcgccgacagcctcaatgacgccggcgacgtcgaggccaaagatggcgggcaagtcctgcatcggcatgggcgcatagccagagatgatgtccttgataccagggcccttgaggcgacgaagacgagacgatgtcagttctgcttcgatgagaacggagggcgagcaggagagccgcactaggctgcaggcaccgacccggacgagaacgtcccgtgggccagggataggcttcggggccaggccgacgacgagcggctcgccaaactcgacgatccgggcaaccttgatctggatgttggaaggcatgttgtatgggttgagagggaggcgtgggtccgagcgagcagagcagaacgaactcgagaaggcagtgatgcgaggtgagaaagagcggtcgtcgcctcgtcctgcccttcttgtaggccttctcagctcaaggagccgtcggctagcagccgtgatatgaaccccagagaccgcttgttaggctgggcatcgtgccatggaggattttgacggtcaaggtcggaagtcgctcatcggtctgagacgcgcctccctccgagcgcagcgagtttttgcccgaggctcggccatcgcccttccgccctcagtagccactcgacgcgcaagtgtcgcctcgcatgcgccgactcgggcagaggtcgacgacaatgatcaggcaggttcggccgtgcaagtaagctcgggcttgatcaagaggcggtcggagggcgcaggactgataagccgctcacagtcgacctcaagccaagctaaagtagtgcgagtgtctatcacaagaagacataaggacaaagcacagctctatggctacaagactcccccttgctcccgcgtcagtccttcttgggcgcaccgtccggaatgacgacgacattgacaaagccgcccggccggtcactcgcggcgtcaagcgcctcgttgactttctcaagcgggaacgtctggttctcgagccacgagaggtcgacgacaccagcgccgatgagagcgatcagctcgtcaatttcgccgtcggtgaaccagtttgagccgacgagggtgacgtcgcgctacggcaggtcgaaagagggaggggtgagcaggtcagcccttttgcctgcgctgcaaacggggtcgaccgagcacgcaccatgaaccagtcccagtacgactgcttgatgtcgccctgcgcgccgcccgcgacaaggacagccttgccgccgaccttgatggccgagcggacaaacgcctcggtcgtgctcgccgcgccgccgacgccgaggcaatcgatgaatgcgtcgacgccaagcccagcagtctgctctttgacccaggcggctgcgtcgtcgtccgacttgtcctcggtcgaacggaaggtcgcgacgcgctcggtctccttcggcgagagcgcctcgacctttgcgagccgttccgggttccgaccgatgccgaggatcttggtcgcgcccatgcccagggcgatcgcgacagccgaaacgccgagcgtgccggtgacgccgttgatgaggacggtcgagccggcctggacgccggccttcttcagcgcggcatacgacgtgccagagtagccgagccgagcggccgagtggaggtcgatcgagtcgggcaggacggcaaccttgctgtctggcgcgacgacatactgcgagaggccgccgtaagggtgcatgttgaggaggtcccggccttcctcgttgatggcaaagtagccgcgtaggctgccttcaagcacgccagcggagaggtcgttcagcggacgttacgcgggtgaagcaacggaagaagctagaggacgcactcgccgggcagaggtcacggcggcccttccggcagtggtgacacgtctcgcacgagagcgatgggttgatgtagacgcggtcgccggccctgaggtgatggacctggctgccgaccgactcgatcacacccgagacgtcgaggccaacgatggccggcatctcctgaagaggcaggccctggccgccgttaaagacgttcttggtgttgggaaccttgcatgcgaagtgggagcagcggtcagaccatgatcaggcggtcaacaagacggggcgcaaggcggacgcacaaagttgcaggcagcgacctggacgaggacatccctcggtcccggcttgggcttggctgccgtgccgacctcgaggggcttcccaggctcgacgaggcgggcgacttgaatcttgacgtcagacatggagggtaagatgcgttgtgggtggggcgaggggatgggggtggaggtgagtgagcgaggagagaaggtcgttcaggtttcaccgtgcctttaagaggtgttgctcagccctgccgagggtcagcaccttctttcgagactgctcgatgtcgtccgggatcggaagctgccgtcacgatgttgcccggcggcccgcctacgttccgtcgccgcccggaaggaacgccagcaggacgagcgtcggtcgggcagggagatgagcgagcgtcagcggggggccgccttcagccgctagttggtggtgcaagtgcttgtggcggaccgcattcctcaagcggcggcttactaggctcaaagtcccgggcccgagcgaggacgctcatcagaggaaattcgggaatcagccgggcgggtcgagcgttgttgatcgacgtcggaggaacaagaagggtagcgacggccaagcccggatgacctgaccttccttcgtctgcttcgccgacgttatctgctttgcagcttgtcctagcccgacacgctcgtgtcgcctgcctgcgccgcatgcccgagcctctgtctttgagaactgaccccgcctgcgatcgccctgctccaatcgtccaggccgagtctctgcctcgaccaacctgcggcggcccgccttcatcagcctgccttgcggccagcgtccggccgaccctctgcagcccctttgctgcccccgctcgataagcaaggaaggagggcaggcgagacttccttcttccctcgacatccgccacccaggcagagcagacgtccaaagaagcttgctgctctcccttctccagcagcgccagcagctgctccggagccgatggtcccgcgtcatcgagcacagctgggcgaccgtcagcttcaccacttgccccgcgcctcgccacctgcgaagcccgcctgcgtcggcgatcctcgttcggaaggaagtcgccatgaaagctgaagagcagactggcggcagcgacagcaacatgtcgaccccgaacgctgcggagcagcggcagccttcaaaagccgagcacacggtacttgcctcattaggtgcttatgatagagtgctagccgcccgatacaattacaaggagcccgtctcgccttctcaggtcgcgagaggaagtccgctgccgtctggtgtcggcagcgtcgcgagcgtcgcctggagcttgcggagcgacgtgacgagcgagtcgaccttggccggcagtggctcgactgggatcggccgcgggagaaaacagtcagctggagatcatgcagcggcagcgaggtgtgaaatgagacgtgcgcgtgtgagcctcgacggtcgattcgacgaacaacaggtcggccgagagcgcctcgacttgcgccagccgtttggccgagacggcttgcgccttgaccagcttggctcgcaggaagcgtttctgtcgacgaggtgcgcgaggacggacagtgatcagcgctgatccgctctagtaaacgagatgtagcggccgcaggcatggccgcaggcatggccgtacctgctcgacccgtgtgcggagggcctcgatggacgcgtcgagcgagcgctcgcctccgggcagcgaagcgacatactgcccgcgacgaaagtcaagtccttcgtggtcgggctggaagagcgggtcgacaagtgtcagccgctttcggcctctggtttaggtcgatgcggcgccggcccgcccaggaggaggggagagacgcacgaggacgatgctcgagccggcctcgccgacggtgaaggcgttgcggaacgtccaactcgtcaaaagatccatcgcgctgtccatctggttcgtcaatagcgtctcggccgcatgcaggccggtgtgcatctcgtcctcgagctgggcttcggacgcgcccgagccggctggtgcggctagccgggccgagaggtagcgctcgagcgcgtcgagcgaggtgaagatctctgcgttggccgcctcgtgctggaagggcgaagtgagacggttcagcataagcaagagcagcaaacgcagcgccatcaacgcactatgtcaaagaggagcttccggggcgggtggcgcatgagctgcgtgacgacggcgagctgctggtcctgcgtcagcggcgggagcgagccaagctcggacgggctgtaggctggcgtgcaggtcgacgacgaggcgaccgcgtttggcgaggacgacatgcttgcgtctaagctggagctaaggggagatcgagagggcaggtcgaggcagcgaggtcgtcgatgttgggtgacccgcgcaccgagccgcgacgcgacggcctggcggaggtttcgcgactcgtgctcgcccgaccgccattttccaacctcttcaaatccgaggtctgtagtctactgaccgctgacaggcgcagctggagtcattgtgtctgcctagtgtacgctaacatttgacattggcctgcctgcgctgacctctagccccggcccaatctgacgacgcgccttcggcgagtgcctcgcatcggctcgtgcgctctcatggcagtcggcccggagctctcaccagggctgtcaaagcacctgcagtcgactgcaacagccctctctgagctgacctgctttccttgttgccaccgtacgaatgcgccggcagcagcaccgacgtcgctcttgctgccccttcgcatcaaccaggcgtcctcgcccgtaacgtcgctcgggtctgtcgtcctccagccgtcgaacttggttcaatccttgtcgttgctgacatccgggccaacgactgacctgcaggcatccttgcccgcagagggtgaatgctctgcggccatggacgggcgacggcccattctggtgctcgtctattagcgtcgctggtcagcgcgaaggtaggcgagttggcaggcaggacggcggacgacgcctgggccgggcagaaagcagggtcgccgacgggcttggagttgagggtcccctcggccaggacgggcaggccaagtcgcccttttccgcgcgcgcgcgcaggagacttgtggagacaagcgcggaatggtcgagcgctgctgagccagagacgagttgcgaactgttcgactggaggcactggtatcaggcaaggcgtcgtctgttcatgctgccgcgacgcgtcgtccctttggtcgtggggagagcagcgaggaaggaaggagggctaccttggccgaccgaggaccctcgattgtttgctcggttccgcccgcgcagttcgcgaccgggcgccgccgccgaggccagcagcagcggagggagtttctcccctccctcttctacccaaccatccatcccagagctcccgccatgtcggtccggacgacctactttgcccttcgggacgtcggcattttcgagtcttggcccgacctcgaagcccagctgccggtgcgtcgtctctcgtcgccgtctttcgcgcgcgtccgcaggaggagcccgacggaagcccgtgacagaccgaccggtgcttctgtctggcttcgtctgcgagctctgcagaactctgcgaagcgatgagagctgcgatgctgacgtctttcatgctgtcgactcccttgttgtgctggatggattgcgccgtcgactcgaccagggcttggaggacccgcagttcaaggcgtttcgtcagtctcttccgccaacctcctagaggatgtcctcccaagacaacccgcctgcatgctcactggtcatccatccgtacacatcctcttcggctacaggcacactctcggccgccgaggccttcatggccggctgggatgacaattcgtcgtcctcgcccttcggctacgccgggccgtcgactctccctccgacgcccatcaacaagctcggccgcgtctcgggcagcggcgagcgcgaagagacccgggaggagcgcaagcggcggaagaagaactttgcggcaccttcggcagccctccgacagccggcgccagaggagacgctgtcagagccagtcgagcatgctgagacggcggccgcgcgaggcctcttccaaacgacgtcgccgtttgccagcggctcttcgccttccatggccggtccgtcaatggcggctgacggcgacagaccccctctgcgcaacacgaagtcgttgccattgatgtcggagctcgcaccgtcggcctcctcgcttgcaccgccgacggcagggccaaggcgccggcgttcgccgctcatccagtcggtcgtcgaagaggaagaggacgagccagccgagtcgaagctgctctcgccgcctccgtcgtccgactctgacggtcactcactcgaggttgaccgcagtagggcgagctcgatcagcgccggcagcctacacggcggcggcaaggatcagcgaaagagcgctttcgggctcggcctcggcaacgtcttttcttcgggctcgaaccgtgcccccaaggctctgctgagcccaccgagcagtccgagccgaaacggcagcttctcctcggtcgggacggagggctcgagcggcgccggcggatgcgccgacgactcgacgacgccaaaggccagccgctttacgctccggcgcaagtcgaccgcgccggcgccctcagccgacgatgcgtcttcggtccggtcatcggccctctcgatcaaatcggcctctggctcgcccgtgccttttccaactcgacctaggcaacgctcaatgtgggatgagccggcctcgacctccaaggcctccctctcgccgccgcatgtccctgcgatgccgcgaaaggggacgatgcgccagccgtcgttcgcatcgcggtcccttgagccgcctgtccggccctcggccagctcgcagctacaaagctctagctcgatggattcgcttcactctgcaacaagtgcgacgccctcaggtccgagcgcgagttcgcccgcaccggccgtcgacccgcacagcccttttgcgagccaggcgcctgtcttttctcgacagggctcggtcacgtccggtctcatcctgccagtcaaagcttctgcggctggctcgtcgacgtcttccctccgacgactctcgtcggccaactcgttgactcctggccaggacggcctcggcagccggccgcagcgcttcaactttggctcaacctcatctctcggctcgctcgagccgccgccaaagctgtcgagccgcttctcctactcgtcctcccgctcgggttcgcccctcgcttcgcccatggcctcgccctcagcctctgtcgactcgttctccgacgcactcacgcacatctcggcctcgacgccaagaacgagcccggatgccgccttcgaggacgactcgcgccggaagagtcatttcgacccgatggcactgccagcaacgcactctggcccaggcttggcatcaaagcccgccgccagtgctcctgccgcccaaaagtcctcggagggcggctggcgcaagacgctccgccgcatgaagagcgcgttcggcggcgagtcaacccccaagaagacgtcgaccgggcgggcctgagcgcccacccgggtttgaatcttcatcccttctcgctctacctccggacactccctatcctcgcgcgcgcgactcggacttgccctgcctctgtcaaattctctctcttcgctttcacgtcccgtcctgccttgcacgcactgcaccctcgcactctgcatctcgtcctcgtcgatccaagtcatatagtcaatcgaattatcctgctcccgacgagcatagctgccagcgagtgggggggttgggcgagcctatacacgtcgtcgtccaacgcgatgagaacgcggtcccgcgtcggctgggcggagccgacggcagcagtggcagcagcgacgagcggcctcgacgtgctctccctcgacgacgaccttcttccccgacctcgccacttcgccgagcccgctgactcgcttctcagcggccgaaggacaaggaaccttattgctacagggaccggtgtcgaggtcttggccggtgcccatgaaggccagccgggaggccggtcgcccgacggacgagctcccttgccgacgtgtccgactactgggcgagccacagacgttcagtctcgcgctgcacgctcactcgacgtccgaccagcagcttccgaccctgtgtacctcctgaaggcgtccagcttgccggtctgatggctcaccgaagccggcgtcggaacgggacgaaggaacgcggacgcgcgtcaggcctgtttgcctgcttgcgactcgacgcgcctcctcttgctcgctcatcggcctgttcgctcacctgctgttgtgtagcacaggccgccagcggctgataagcagcgggtcttcgccctcacactgactattccctcttaccaacgccctccttgtccacagccgtccatcgcatgccctcctttcaccctccctccccgctcgtcgccatgctcgctcttctcacaaagacagccctcgccgccggcctcctcctcctttcgtccgcctcgcccgccgctgccgagctgcgtcaaggcccgaccggcatcgaatacgtgaagcgctttgtcgcatccgccgccgtcgtcccgggcggtccttgcaccttccagtgtgagttggatgcttgacgtccctgccgaatctgacggctgactgatacaacggtgcgtgcaggtcccgcctcggcagatggcaccgtccaaccaacaacactgacgggcgtcatgggtggcatcacggaaggtacgactttcaccacatgcagctaccctggggtatgtaagagcgatcttgtcttggcttgctccgcatgcagcaacatgttgtctgacgtgcccttgctctgcatctctttcgacagatgaagacgtgcgaatacaacgatgacaccggagcgtccaccgtcgtcattgggacagacagcgctttctgcgccagccgggcggtgggaccgatctgccctgcgccactgccgccggcgcagcgacgcaggcgggccgagacgaagctcgagcgtgtcgtgcgcgagcgccagtggaagccccgtcgcaacgagcgcccctaagtgcgtcgcccctcagtcctttgcgtccctctcaccgccgcttacgctcgcccgtgcggtcccgcttcctcggtcgcaggcagcccttcgtcgccgctgcgcattctcaaccctttcactcgttctcaatggtgggcctcttgaacgctttcttcgccctttgttcgcttcttcggcttccctgtctctttccctcgccgtgtcgtgccgtgcgcgcgtggtccaatccatgagcgtctccgaacgcgtctgatccagcgtcgcctgcgaatatacggaaagcgcggccttgcatgctggggcagttctcatgccattggtgcccctcaattgcgatagtatggacggggagagacgaacgagacggctgggtcgtcgcaacgactgcgctacggccgaaagggttagcgggcgactctgctgcccgaccatgacctcgccattcactctactcaaccccttctctttggcccaacctagctgacagcgtcggcctttgcccacggaagggcgcatgccctcgacgactcgacggcggcccgtcagaggctctcccgaacgaccgctgacgttcaaacgcggtcgagttcggcttgcacggccagcgggcggccagaagcacggggctcgtcgcccacgcccttcgaccagcaggagctacacgatgccgctgccggtctgctcgtaccgttctctcaggcgatctcccgcctcgtcgtcgtgcggtgggtctggtggctcacgcccagatgtgcgtggacgaagggtgctcgctccgtctcataatctacttgtgcggcgcagccaagcctccttttgctcgctcgtcttgttcgctccctctgcgaccctgcagcacaggccgcgaggacgctgaaaaagcgtcgtacgcgagctaacctagctcttccttctttccaacacccaccttcttcacagccattcatcgtcggccctccttccaccttccattcccgttcgcgtcatgctggcccttctcaccaaggcgacgctcgtcggcctcctcctcctttcggccgcctcgcctgcgactgccgaactgccttaaggcccgaccggcgtcgaatgcatcaagcgcttcgcgccgtcggttcggccggacggccagagctgctcgttccagtgtaagtacttgctggagtcccacccgtctgacctaacggctcactccggtcgtttgaagtcaggcccgaccgacaagcgggaagtcgcgcccactagaccactgggtgtgccagtcaacctttcaggcgtgactgcgtgcgagtacgtagtcgcgccgggcgttcaagacacctattactgcgtgtactacgacagcaatggcctgttgttcggctccggcgataccacctaccccgccgatgcagtacctcaggtctgcacgccaccgccgtcgccgcctcgtcgcaagcgagcggagtccaagctcgagcgggtcgtccgcgaacgccagtgggagccggtccgcaacgagcggcgctaggtcggtcgttctcgcgatcttgattgcccttcttgcgagccgctaacgcctgctcgtgctccctctgactgcatgaaattggctccacaggcacggaccgcaccggttcacgtccggccctgctcgatcgttgctctgcgcctcctgaaacgctgcttctctctttctcgttgaggccctcaaatgtcgatgccaaccttctgtctttgtccgactgctgaagtctagcagcggcctcctgtctttagcacctcttgcgagagcgccaaagctggcgtaggggcatcgcttcgccgttattacacaaagcaagcgcttcgagcagtgactcgttgctctctctcttcaagacgcatcgatcaagaagaaggaacctcgacgcgctcaacaagaccctcacccagcctcgaaagctcggtgacgaggccgacctcgttcaggacaaccatctggctcttggcgtcgccctcgaaggcgacaggccggctcgaaaagtcgagctggaccttgaagtttcgcggctgctggtggcctgggttccagaggccgccaataacgttccctccgcgggcatcgtggaagaggacaaagacgtccccgaaggcgcgctgcaaaggtaagggacagagggtcagctcgtgtccaaatggggccagagggcgacgcgaggacgcacctcgacctcgcgcaggtacatggcgaccgggtcaaagtcgacccgaagctcgctgccgtacgtcgcactgctcgacttgaggctgctcgcattcttgtattttgactgccaggcggcagcgtccggcgtgaccgcctggtgcgcgcgcggaaggacggccgacttgaggtgaatgacaaagttgtagtcctcaagcggcgtcttgaacagttgctgtgcggggcgagaaggaggagggtcagtcgcggcgtgagggcgttgcggcagccgggccgttttttgactgacctcgacgatgagcgacccgtcgtggccattcttctcgaggcaggcgagcgtcgccttggcaatctgactgatgcgagcggcgacgagtcggctcggttgggcggcgccaaagactcgaccagtaagatcctcctcggtcgcgacaaagaaggcgcccctcgtgatccgaacgtcggtctcgcggagcttcttgaaggcggcgagcgcccgctcgcgcttctcagcggggaaggcgaccttaacgccagcgtcggcgcccgcggtcgaatagagcgggaggacgagcggcgacgtcgcccacttccagcgggcgaggagcgccatgacgcgcgcaaagccagccgcgtacgatgccgggggcgaatgcggagtcggcacaaggtagacggccgcgcaaagcagctcgacgagctcggccgagacgtgcgtcgaaagcatgtgggccgagagccagcgctgaacgagccgggccgtcagcgagaaggaagggtagaggtggtggagcgaattgatggcggcgtggtgcctcgggagagccgagaagcggtgctgatggaggtcgagcgccttctgggcagcgcggcgcgtgcgcggcttcgtagtcttcttgtccgagacgagctgctggagaagcgtcttctcgcgatcgtggtggatccggagccggaaggcgaagccagccgggtgaaagacctcgagcgagcagttatcgcgaatgacggcctcgtccacgtcgtcgcagtcgtcgacggcgaccgccacctcggctccctgaatcgcgccggcgaggagcgtcgccatcttgtggaagaaggcgagcttaatcttctggatcgctgccagatcgtcgggccacttgcccgacgactcaaactgaacgacgacgtctagcggctcaacatacttgaggcagtcgggcgcgagcccgagccggtctgggtcggtcgcaagcggcgagaagacggacgtgtagcgaagcgcctgagcaactgggaagacgttgagcagcgagagcggcagcttgtcctcaagcgagcgcagcgtcgtcactagcgaggtgtaggcctcgaaggccggccggaagccgtcgagcggagcgtcctcgatgacgagcaggtcccgagccgaaatcggcagctgaataagcggcaggtagccggcgaggctctcggtcgtgatggcgtcagcctcaaggccaaagtggcgctcgaggatgtagcggactgagcggccgacgatgagcgagcgctcgccctcggtcgcgtcaatgtcccagacgaccgactcgataatgcggccgtccttgaaccgccggagctcgctcttgtcgccccagaactggcggaagtcctcggatccagcctcgtcctcggccgatggtcctgcatcgacgagccgccagcactcggcctggtcgagcgtcaagcagagctcaacgacctgtgcgtcctcaatcgcagccggccgagcggtacccagcgaccaagtcgtggtcgcagcggccggggtcgagcgcgagagcacgacgagtttgacgcgcgtgctgagtgctcggcgaaggacggcagacattgaacctaggagatggttgagccgcgatggctcgtcaagccggtcgagcggggccttgaacttgtgctgggcggttgagaggtcgatgctggagccaagagatgaagagtcagcgtcagcgtttgagcctgcttgatgctcgaggcgaccgctgcacgtaccggaagacgacgtcaaacttctcctcggcgacctcaccaccacggaggaagacgcgctcaaagatctcctcaccctcgccctcgagcccggcatccgagtcgaggaggtcaagcgtgcctttagcctcgcgcgcgacaagcgacaagacgcccgactcgacaccggtgaggacattaacggtcccctcgggcccgacgagaacgcccccgtcactgccgtccgcgaggaactcgtctttggcaatcggcgcgatccggccggctccgctagcgaccttgccgtgcggagcgaggaagacagccgagcttgcaaacgcggtgtggctgaggaagtcgaggacggcccggaggacctggtaagaggacatgcccttgccgattttgcggccggcggcggcaggcttgccggcagtccccgcccgcggtcggatctcgccgccgaagacgaggaagccgaggacgagctcgacaaactcgcgccagccggtcgagggcgagccaaacggcacggcggcgccgagtccacgcttggcaccccactgctgaagaaggagcgaggcgtccttgaacgcagggagagcgttactcagggcgtgcaggtagagcagccgcgctggcgcgagcgactgagcgaggagagccgcgttgtacttgggcgtcggcggcggtgggctgtcagcgccggatgctggcggacgaagggcgttcctgagtggcgagagcttgctcgtcgggaacagcgagggcgggacgaccggcgaaaggacaatcgagagagcgagcttcgagaagtcgtttgctgagccgtccgtcatcgatcggacgacgagctttggcgcccactcggctccttcctcgacccgccactcgacggcgccgaggccgagctttttggcgtgcttgttgagctccttgccgacgacgccgagccagtagacacgcttgtgcgcccaccggccgttgagaaagtccttgtcctgaaagaaagcctcgggcatcgcaagcgcgagctcgacctcgccctcgcggcccttgcccttcttggacgcccggcgggcgacaaccgtcccgagcggccacgcacccgtcacttggcactcggtcggcggcgcgaactccatcagccacttcgagtcgtcggccggcccctggcccgggtagggcaggtgttcgcccgacgaggtcgtcagccgcggcgatgtcggcggcagcgccttgagcgccagcaggaacggccgaagcgtttggagcgtggtgaggagtgcgctcagcggtggtggggccgggtgcagggtcggcgaaagcggccggagcgaggggaggagcgactggagcaggagcgagaagaggggcgacttgtagagcgtcgttgccgacttgagggctgcgcacacgaggtcgaagaaggtcagctttgggtcgactgactggatgccgttcaagtcggacgcactctgcatctcgtcgttcgtcggcgggtggtaaagcgacgagcccttcttggcgccgtactcctttgcgggcggcggcgcctcggcgtcctcgacgtcctcctcctcggcatcgtcggcaccattgctgctcgagcccgagaccgagacgtggtcggcgacgacaaagccgtcctcgcccgagtcggaaccctcgccgtcgccgtcgctctcctcggcctcgtcgtcgacaaatgcgctgcgcccggcgctggcagcgctctcgccgtccgaatcgccagagtcctcggacgcgccaccgacacccgaggcggcgagcgcggcaacgtcggcgccgtcgtcggagatgtagccgtcgtccgactcttcgatgatcggcttcttgggtgcggtgggcttggcctgcttgagcgccgggcgctgcgagagggagcggtcgttcgagcgagttcggcgtgggtcagctcggagcggacgagctcggagccgtcagagcggatttcgaggccagcgcaccttggatgacgggccagcggccgagctctgcgacttgcgtttgagggccatgactttgcgagtgaacggcgttcgagagaggggtcgtcggtcgagcttcgcaactgctcgaattctggccgggcgcagcgggcgggcgggcgaggaaaatccaaaagtcagcttcgatcgcgccgtaggcgccaggcgaacgtcgctcctcccaccctcgcaagccctgacctcatcctcctctactcttgcacctccctctccagcccctcttgcagcatgtcgtgcgttctgagagtggtgatgcgctcggcagactgcagcactgattccgactgcctcctcctcccgccccgccaggctgtgcccgccctatgcgcccttccttggcttcgccggcgtcgcgagcgcggtacgtcctcgtgctgaccgctacccagcgactccggaccggaccttcaaggagctgctcttgctgacctgtgacgctgctgctaccgacagatgattctcagcagtccgtccgatccagacgaggcgcagagctggcggcgaggctgagctggagctcgctcgcgccgctctgtccatctccacctgccgcctcgggctcgcctgctgacgcctgctcgctgcgtctgctcctcagccatcggcgccgcctacggcacggccaagtcgggcatcggaatctctggtctcggccagtttcggcccgacctcatcatgaagtcgctcattccggtcgtcatgtcgggtgcgtccgcgcggcgcccccctcgacccgcctgctcagcgtcgctgaccctctcgtggcacccgcgcgtcacaacaggcatcattgccgtctacggcctcgtcgtctcggtactgattgccggcatgctctcgccgaaagaggactactcgctctttgccggcttcgtccacctcggctctggcctcgcctgcggcttgaccgggctcgcagcgggctacgcgatcggcatcgtcggcgacgcggtgcgttctcctggagccccgagcgccttgatcgcgcttcacggacgctgaccctttcacccatgtgccctgctctggccgcagtgtgtgcggacatacgtctacgagtcaaaggtgttcgtcgtcatggttctcgtcctcattttcgcgtaaggtccccggcccgtcgacctctgagcactcgcttctggcagactgacacgcctgctcgaacacagcgaggtcatcggcctgtacggcctcatcgtcagcctgatcctcaacacggccgtcggcacgatcaaggttcgtccggcctgctgctggctgtggcagcctgctcacgatcgctgtgctgactctcttcgcctcgtgaaacagtgcggcgcatgagcatctccttcgctcgcagagtagattgacagcggatcgcccttctcttgacatgggaccggagggtcggggcgaggcgttccccggcggcgaccgcgggctcgcgacacgggtgtcgtcgaggggaggcgccgccccgggtccgactagcaaactcaagagattatacccccacatgaccattgttctcgcaggcctgccggagagcgagctctaagcgccaaaatgggggaagggatgactcgacaagtggcgcttgattgctggccccggacttgctcgggcccgccggcgacagccgcctgccgtgaaggctgcacttcgaacatccccctattgacaacccgtcaaccaccatcacatccaaagcccccgcccagcatgtcctcgcttagccgatctttactcgccgcgtccatacggcacacgccttcctcctccatgcgtcttgctgccgccctcgtccgagctgccgggctgcgcagcctgcacctgacgagcccgcgcggcaagacgcagctcgccagctcgtcaacctcgagctcggccgcctcgtacgcaagcaagcgaggcgagcagaccgtcggcagtccggccgaggaacagcgggtcgagaaggccgagcaggaggtgcgcgacatgtcgcgcatcgacgacctgctgaacgagattggccggtcagaccggccctccgagcacctcctcgcatgaggacgaggctgctgactcctccatgccatcgctcctgacctgacacaacctttaggacgtccaagaactcagccgggatacctatgaaagcgaaggcgccctggaaggccatccccgcgagctcctggtcgttcacctttgatccagcggcgcgacacgacgaggccgaagcgttgaggccgacgacgactgcagcgtcagccgctgcttcgcaagcggccgtcgcggaagagttcgacctgccaccccgacgcatgtcggactcgtacgtcgaggtacgttgtctcgcaggtcggcgtctggccgggcacgtcggctgaccctttgacgtcgcgcgcaggtgtcgctgccgttgctgagcgatcagaagctcctgtcagagtacatctcgacgagcggaggcgtgcggatcggcaaactgatggagaacctcgacgtacggtctcgagcgatcgcttgagcttgtctggctcatcgctgactgactctcggcgcactgatctcacagtcgctcgccggtgccattgcctgtgcgcagtcgcagcttccccttgccgttctcgtctagagcgcgcactgacctacggcctggcccaatcagacaagcacgtcctgccgccggggacgaccgacttcaaggcggcgtcggacaaggcgcgcgtctacctcgcgacagcttcggccgaccggctcgacctcttccagccgctgacggtccaggacctccggctctcgggccacgtctgcttcgccgggacctcgtcaatggaggtcttcatcaagatggagggtctgcgcggcggcgaacccgtgacgctgatgctcggtgcgtgctgcgtcctgaactggagttgaccgtcctgcattcagtcacctgcctctctcatctacaatcactcaatcacctgcgtccttctcctcgttttggccaggtcgcttcacgatggttgcgcgcgactctcgcacacacaaggcccgcaagatcaacgccctcatcgtcgagacgccggctgagcaggacctgttcgagattgcgcgcgagcacaaggcccgcaagcaggactcgacaaggacttcgctctcgcgccggccgccgacgacggccgagatcagcaagctgcacgagtttatgcttgcccacaaggacgtcaggccgggtcaggacgaggactttgtgctcacgcgagagacggtcatctcgggtgcgttgccactgtccgaagcttccagtgaaggtttcactgacgcttctgtgtaatacgatcagaaaccgcgctcatgcaccctcaggtgcgtggtcaatgacagggccgcagtggacggcagattgacttccctcgcctctccctcgactgaccaactcacgctctggcctgctcgctggccatcgcctctagagctccaaccttcacggcaagattttcggcgggtacctcatgcggctcgcgtacgagctgagctattcgggcgcgatcttgttcgcccggtcgcccttgcgctttcagtaagaacgccgaccctcgcacatctgcagccagtcgaccgagctgactcccacttttacctgccttactcagggccctcgacgagatctccttcgcgatgccggtccccatcggctcggtccttcgtctgacggcaacagtgacgcagtcgtcgcccgagacgaaccaggttcactcgcaggtctcggccgaggtcgtcaacgtctcgaccggcgagacgagggtgaccaacgacttctactttacgtttatgcgcgatgatggtgagccattgacgcgccagatcgtcccagaggtgcgtcctaagattagcccgtcgtcgattgtgcttagctcggccggcgctgacagcccttcctacttgcctccctccttccttcggacagacctaccacgaggcgatgaagttcctcgctgctgagcgccgcatggcacacggcgacgagatgcgcggcctgctccagccttgagcactcctcctggcggtctgctctctgggccagctgcaaggaaccgggcgcagggctcgcggcagaccgacttgctgtccacttttcttccgacgactgtgaaaatgttcattttgcttcagatcacccatgtccagcgccatgactgtcctttcacgctggcaggggcggcatcagacgctgcgagagagttggtcgagtcctcagggccaaggatcggggggcgtcgcgcgcgcgcgcgaagagcgctgcgcttctcgtcaccgccgtcgcatgcatagcgaggacgagcgatggacaagctcccgtccgaacctcctcctccctcccaaccacatcccaccctctccctccttcggctctccaacgccactcgcacagctcgacgtgtagccttttcgcccgaaatttcctgatgtcgaacgcgattcagtcctttggcaagggcgcccttcgtgtggctaagaactatacgaaaggctactcggacacccaggtgcgtgctttgcctctggcagcgggagcgaggcgacctcaagcgcaagtcggcggtcaagggtcgctactgtcgtcgtcgagcctccatactgcaggctgccactgggcgagctcggcgggctcaatcggatgagccgggttgactgaagcggctaggcgagcgacagctgaacaaggctgacgaccgcctgttcctctcctcgcctctcctgtccaccggtccctgtcactcgacggtcactgtcggaatggtcttctatcggcctgtcgacggcgctttaccttcatgtctctcctcgcgtcacatgctcgccatcttggaccttcgactcgtgtcgctgcctcgctccggcatcgacctcgcctgccgacctcgaacaaaccgtcttcgggctcgccgaaccactctctctcacgcctcaccgaccgaatctgataaaacctacagacaaaggtccgggatgcgacctcgaacgacgcctggggtccgtcgggcacgcagatgaacgaaatcgcccagctcacgtacaaccagtgcgtcactagtcttcccttcataacatcttggctgcttcgcgtctcgcagcggagtcgccggcgagctaccgactgctccgagtcagagtcggtgcccgcggctcctggccagctgcagtttgtaacggccgacgaggcagctggcccgcgccccctctccgcttaggcgggcgaggtccggtagcactggcggtctcggctctgtcgtctggcccagcggagctcctgctcgctcaacttctgctgtgctgctgatatcatcggttgggcgaggcgaggcggctgggctgcgagacgggcagtcggttgtcacccagcagagcgccgggcctgtcttcagcgagaggcgcctgtcgagtagctcagactggggtcttggagcccattgcggctggagctgcggatgggcgcaagatggcaggagtcttgcaccgtcgtggcgagctgttgcgccttttggtctgccctgcttgattggacgtcggctgactgccgtcgcctcctgtcagaaacgactttgtcgaggtcatggagatgctcgacaagcggctgaacgacaagggtaaaaactggcggcacgtcttcaaggtacgttccttgttggcggccgactcgacctctctgatcacgagctgacccctaaccggcacctcccttgcttaggcgctgacggttctcgactacatcctgcactccgggtcggagaacgtcgtcatctacttcaaggacaacctctacatcattaagtacgggcgctccccgtcgtcagcgattgcatcgtagagtaagaccgctgactgcactcgccatggaaataggaccttgaaggaattcgtctatgtcgacgagctggacaaagacgtcggagcgaacgtccgccagaagtcagtcatggcgtggcgtgctctctctctgttcagcaggctggccgtgcatccgattgacgcaaaacgctgctttgctcttccaccgcagggccaaggacatcaccaacctcttgatggacgagagccggctgcgcgaggctcgtcgctcgcggggcgcgatggctgatcggatggcgggctcgtctggtggcgaccggccgtcacgagggtcgtacgaggaggacgaaaactcgaggaggttcgtcctttccaagctttgccagcatggccggagtagagcagttcgatcaagtgacacgctgacatcatttcccgtttcactaacttctcgcgccacgttagacgccagcaggaggcggcgcggtctcgccgtccggcaggcggcaacgaggacgaggagctccagcgggcgatccaggagagtctgtcgatggacaacgatgcggccgagcggaagcgccgcgatcaggagtgcgtccgtcgtctcgcgacaagcgagcgtctgatggcggttgtcgctgatcgcctccctgccccgcttctgcgccctccagggaggaggagctccggaaggtgctcgcactgagcgaaaccgaggaggctgcccgcaagcgcgaggaggaggctcggctgaagcggctcgaggagcagaacgcggctgcgctgtttgacgactcgctccagatgtgcgtcttggtctgcctcgagcgcggagcgaccccgacactgacccgagtcggttgttgaaacctttagtcagggccagaacgcctatcagggcgtcgacctcttcgcccagcaaccggtccaaccccagcagacgggctaccagtcacagttcaacgtgagttgctggcgtgcctcatagccggccgatcggcgactgacgggctcaaccccacctttctcctcatcagccgttctaccagcagcagatgctcgagcagcagcaggcccagcaacaggcctacctccagatgcagtaccaggcgcagcaggagcagctgcagcgcgagcaggcggcggcccagcaacaggcctacctgttccagcagcagcagctcgcccagcagcagcagctgatgccccagccgaccggctacggctccaacaacccctttgcgccgggcttccagccgcagcagcaggcgccgccatcgatgccgtcgtttaacagcttcaactcgaacgcccagcagccggtcgacacgtcgttcctccaggcgaccctcccgatgcagcaggagccgcagcagatggcttcgccttcgaaaccggccccccagcgcgggcccaacaaggccgacacggagaacgcccgacttgcgtcgctgctggcgaacggcagagaggacggcctcgacacgtttggaaacgtcggctcgctgcgcatgccggcccactacagcggcgcgcggccgctcatttcgcatcagacgggcgccaacaatccttttggcgcggcccgcttccagcagcagcagcagcagcagcagggcggccagagcaacaacctcgtcgacttctaggccgtcgtagcttgcttgcccgatctccacatacgtcttccgttcggcgccgcacttcgacgatctacctgctagccgtcgacgaacgcttctgtctccctgtcctcctttcccccctccttgcccgccacccgcccatctacatgacacatcacgatccagacttggccggaccgacttgggggcctgagggtctccccccccttagcttagtccgcaggcgagagcaaggtcgggaaggaaccgtcgtacaacaggaaagagcccgcaagcaggcggggctgccgcaggggaactcatgctcccccaatcatcgccttcttcaccttgagcaggcagtcgagcagctgaagctcttcgtcgccgccctcgcagagcgccttgtcacactctgccatcgcctgggccgccagcgactttggcttggacgggatcgacggatgggccacgagcgcgtcgtgcatctacccgggcgagcagatgtcgagtcgtcagcggcaggacgagagacaatcgaattaaaacagatgcggcggctgacctggctgaggacggtccctgcgctccagccctcgcgcttgacccgcttgaccgccttctgcgtcagctcaaaggaacccttgaagtcgctcccgagatagccggcctcttcgtcgacgccgaccgacgatagcagctgagcgacaagcgtcgtcggcacgatgcccgacatttcctggaccgactcgcacgtgattgccgttggcggctgctcggccgcgtgcagcctcgaggccgactgcaggagcgtgatcgctcgccgaaggtcgcctgccgagagcttgatcagaagctcgatgacctggtgagattgcaggaacgaagatcagtgtcaggtggtgcggtgccgcgcagggacgggcaaaaggacgcactccctcgtcgcgcgcgacgccctccttgtcggcgatgaagcgcaagcgctcctctgtgctcgcaacgtcgagcgcccggaagcggaacttcgagcatcgcgaggcgaggggctcgatgattctgagaagtgtggcacgacatggtcagcaccagtcgacctcagtaaggcagcggctgctcggacagaccgggtaacgtagttgcagacgaggcagaagcgcgtgatcttcgagtaggtttccatgatacgccggagggccgactgggcgtcctgcgtcatcgagtcggcctcgtcgaggataatgatcttgaacggcgggctcgggtacgtctttccgtcgctcgcaacaccgctcatgtttcgtggcgtctccttggcaaacgccttgatcttgtcacggacgacgctgatgccccgctcgtccgaggcgttgagctcgagcacgcgattccgaaagctgtcgggactgggagatagtacggagcaggagcctggcgtcagacgggaggggccgagcgaacgctgcggacgcgtaggagccggagcgactgacccaaacagctgcttcgacaaagcgaggatcgtcgacgtcttgccggtccctggcgggccgtagaagagcatgtgcggcagctgtatgcgagcacaagagggttagcctctaagcgcactcgacgtcagcagcacggcgaggacggacgttggtcgaggtcaaggtcttctgcagcacctggacgacgttctcctgcgaggcaatctcgtcgattgtctttggtcgactggaagcaacgcagagggtcagctcccgagctctcctagctactcagacggccgacgtactagcgctcgacccaggggatcgaagcctcgagagccgggccaccggttgaggcgccggcaccggccttgcgcgcctgcttcgagggcgaggtccaactcgacgaaggctcggccgccgaggccttgagctccttgggcttgatgccgaggaaggcgtccatctgtccagggcaagtaaggcgatggggtgtctgacgagctggtcgaggtcgagagatcagaggtctcccggacgggcgctcggttcgcctctgcgcgggcgcggggaaaagacgcgtcgcgtcgaccctccttgccatccctcctccgacctcgtacttctagactgccctctgctcttgaggatggacagcaacagcagcagcgccggtaggaccatggccgagctcgacaccaatgccattccgccagctgcgtcggacccggcaacagccaaaccagacgcggcgatgaagccgccgcgtccgccgacacccttgaagcgcaaggcctcgtccggtccgtctcgcctctctctcgagcgttgagccaagctgactctgcctgtacgcactgcctggccgcaacagatctcaagatcctttactccggcaagaaggagaacccgctcctgctctccgactcggatggcgtgagcgactcggacctcagcgagcccgaggacgagctgctcatcatgtcgcccgagaagctgttggcgtcgtcgtcgcaccctcaagccggcccatcgtcgagcaagccgccgacggcgacgaaaccgcgcaagaaggccgcgaccgtgagtcctggtccgttggccatgcatcgcgatcggtcgggttgctcctaggaggctcggtcgctcatatgaagcgcgcaggcggagagctcgagcacgcgccttgaccaggagcgatgagctgacccgcaccctccctccctgttgcttcttcgtctgcttgtcgaccggaacaggacccgcaaacagcagagcagaaggcagagcggctcaaagcgaaggaggaaaaggtgcgtgcccgactcacaggttcctggacgacgaggatcaccggccggcacattctgacgctcgtccccgctccctctcgtcctcttcctccatcgtcctccggctctgggcggaaccgacgcgtctccaggagaaggctaaggcgcagcgcctggccgagcgggaagccaaggtcagtcgccattgctgcgccatgctatcctagtgcacagacctcttcagttggctgacgtcctcctgaatttacctgtcacccttcaggctgcaaagaagaaggaggaggacgagctcaaggcttcgcgcaaggtcaaggaagaggccgagaaggtggccaagaaggccgaggaggaagcgctgaaagcagccaagaaggccgagcgggacgcgctcgccgccaaaaaggccgaggaagaccgaatcaaggccgagaagaaggcccagcgcgatgtcgagcgagcagaagtcgaggcggcccggcttgcgaagaagaaggagcgcgacgagcgcgagcgcgtccgcgaggaggaggagcgccgccggctcgaggtcaagggcaagcaggtcgctgctttcacgggcttcttcaagaagaaggaggagccggtcgcacgaaagcgagccgagctcaagacggtgacgagtgcgtcgccttccctcccgccttgacctcttttcgttcgcgctttgaccgagtcttcgctccgtatctcgcagagagcgactttgagcggacgttcctcccgttcgaggacaagaagggcatcgtccgggcgccgatcaaccggtttcttgatgagcgccggcggctcgaggccgacggcatcgtcgccggcgaataccagacgacagacatctcgtcgaccaagggtgcgtgtccgcctctggccccgtgccccgcacacgagcgctcattccccctctccgactcacacagacatgttgcggtccttcctggcgagcgtccctccgtcacggatcccgacccggccaaagtacccgtcgccgtcgatcaagtcgggacctccgagggcgtcggtccgcgacgtctttgcgcgctcgcaggaggccgagatctcgggcaacggcgacccgcacaagatcctgaccgagctgctcgacccgcgctggtacaagcgcaagcaccttcagttccgcgaagacacccggccggcctacaacggtgcgtctaggctggctgcttgagcggctggaacgggacaggcactgactttgcaagcccttcctcaggaacgtggacacaatcgtcgaccgtcgtcggcccgcgcacgccatttgccaaggacacgctcctctttgactacacctacgactcgggcgaggagtgggaggagcccgaggagggcggcgaggacctcgagtcgctgtcgggcgactcgccgcggaggtcgtcagcgctgaacgccaaggacgacggcggcggtgggggccgcagcctctgggacaccgactccgaggacggcgactttgcgagcgggagcgacgacgacagcgagggcgaaggctttgtcgtctcggacgaggagatggaggatgccgagcggtcgaccggcgcggccggaccgtcgactgccaacgtcagcccgaccaagggcaaggcgcccgccgacgacgaggttcaggtcgtctctgtctcggttaccaagaagcgcaaaaaggcggctcgacacgagcgtcaggcccaaagcggcagcggcgggaagcggcgcaaggagctcaacgtcctcgtgcccgtcatcaagggtccctttgtcgaggagacgattggcgtctgcggctgggacgggtttgaatcctatcgggtccagctgctcaatggtgagtgtcctttctgcaatgtcgccgccgtgttagcttgaccttgacgcgtggctgcctcctttagatacgccgacgtcgatcgaccccttcacctacgtcgcccggccaaccctgctgccggcgacagcctcggacatctcgccagagaaggctagcagtgtcgcttcggcgatcccgaagcacctcgtccctttgatgccgccaccgccgccgcctcaggccccgggctcgtcgtccgcgacggccggtgctgggccgagctcggctgccagcgctggccctgcgcgcaagccatatggctccaaaaaggcggctgtattcgcgtcggcgccggctgacgcgacggcctcgtcgtcgacgcccaagaaggtcgagaagcggctacctctcgcgcacctgccgcgcttcctcgaactcgtcgccgcctcgactcggccgcaaatcctgctgctggccgagctgcacgacgcgctcaagcccctcggcgtaaccaaggcggaagtgacgaacgagctcaagatccgggcgaaacgggtcggcaaagcggacggcagcccgtgggcaatcgagccgacggcatgggtgcggccacctctcctcgttgacctcttgtttcgagacttaccctctccttcgctctaggccgacgctggtctcctcatcccggccggcgccaccgtctttccctcgagcgcagctcctactgccgcaacgccatcccagcctgctagcacggccggcacaccgacgcagacaaagctcagcctcggacccagcggcggcgttcagctctcgccgatcaaacgatcagaggctgcgctgcccaaagtcgctggcggcaccgaggcgtcggcggcggcacgccgtgcattccctccgccagcgacgccgaaggttgctgcggcgcccgacgagacttgcgtcctctcttcgcccctgtcgtcagcgtccgagccgctagaggcctcaccacccgccccgctcgccgctgcaccggaatcgatggacatcgaccctccgccagctccgtcggtcgctccctccgcgagcgcctgagcctctctgccttttgtaccgatctcacaccaaacgccaccgcgcacccctcctctcgcaccttaacgacccacggccacctttgcttgctagaccttggcgcctcctccctcactctcctatccttttgctcgcgcccgcactgaacgaccaccatgacgcatttcaccgaccctcgatcacccttacgacaagctggcacggaggctgtcgccgtccgagcgaccctgagaacgatgtcgtgtgagacatgttgattccagatcagccgagaagggtgcggtacaaaacgtgggtgaggcgagcagatccggaaggggatggctaccgagccccgactgcgacatgacgtgctccatcaaggaagacgtcctgagcagttagggtacaggacgcccctctctgaggggctcgctggaggcggccgacttcctcggtcagcgaggaaggttgaggtgaaagggtgtgaggggggttccaaaggctagcccgtcgttaagagattcgtcgtccggtcgtccacgtcttgctcatcggctgggaatcaggcgacgacctcaagcgcaaaatcggcaaagaaggcctgctggtcggatgagggcgcccacgagctgtcggacccgccgtagaacgtgctgaggaagaggcccgagaagccggcgtcggcccgggtgacgagctcgacggccgacgactgcatgacctgggccgagttgacggtcagggagatgaagcctggcgcaggtgcgagataggagcgaagcgtcagctcgctgaccaagaggcagatgaggcggccgtcaatggagacgcaccgtccgcctggccgggcgtgttgagccggatgcgctcctcgatcgtgttccatccgccggcgttccagttgaagttaccgcggccaaagctgaggccgtacgcggcatccttgcagtaggcgcccgctccgctcgcgacgcaggcagcgtcgttcgccgccgtctgcgggaggtaggtgtagacctcaccctttccaccggcacgccacatgagccgggccgaccagcagacgttgcgcgagtcctggttgccgcccgagcagccgtacgtgccggccgtgccgccaaagaggcccggcagcttgccgcccttgacccagtcgaacgaggcagggaagtagactgagtagcggaggacgacctccctggcggactgtcaaagggagggagaggcgtaagatgtcagattggaagcaaccgcgccgtcacgagcagctagaagagggccgcacctggatcacctcgggctggacgttgctgtagtagctccagacgctgccgccgccgatcgcgccggccgggtaggtcgcgaccatcgcctccttcccgtccggggcagaacccatcgggcccatcttgcccttgacgggcgcgagcgcggccgaaagtgagagccgcgagaggccagagttggacgaggttgtccagccgcggagggtgacgggcgtcgttggcgcaggggcggccgcggacgaggacgacttagtgggtgcagcctcggccgaagaagacgagggggaggacgaagaggacgaaggcgatggagcggcggccgacgaggatgacatgctcgaggcggcggcagcagcagacgaagcggcgccgaccttggtcgacgacggcgtcgggctcgcggcggcggcgagcgagccgctcggccggtcgcggcacttgaccgtccggcgcttgacgacgacagggccagcctcgtcgttgtcaagcatgatccggcgctcgaatgctgcgatctggaggtcgaccgcatcaggctcgacctcgtcccgggaccgaggctggccggacagcccggtagtggggccaaaggcagagcggtcgtccatcgaccggcggtggacggcggctgctccgttgacagcggcctgctgattgtgccggcgtgaccagtgagcgccgcggttggcgtgctgggacgcggcgagggcgtccgagggaccgagcgagacggcgaggaggagtgaggcgaggagggcaaagcgcatggctggggtgggagggttggctgcgggaggaggacgagcaggaagtggaagggaggtaaggagggagaggacggaagaggctcgcagagcgctctttggagaaggaaggaagggaggaaggggatgaaaggggagggtccggagcgagagaagagagggtcgtgggcgaagggttcggagggaggcgcgtcgcgcagagggacaaagcagaagggcaggcgcgtcgcgggtcgccagcgggcagcccgccggccagcctcgcaatgcctccttcattcgctgtcaaccacagtcaggccatgcagcaggctcccagtcgagccgtctatcgcatgacctcgaccgtctctggcactcttgacaggaagcccgcactccttccgaggaggccgtcaccatgagcaggtcacgcgtgaccgggccctagcaacgtcgacgcgtccgggtcgcgaccgggcgtgcagcagctcgagcgccttgacgacccttcatcgctccccgtctcgcaaacctccgaccttaggccatggagtcctcgtcgtcgttaaagccaccgccagttgccggtccttcgggctacgtcctctcgcacaccctcctcggccacacggccccgctgtccgtcgtcaagtacagcccgtgcgggacgctcctcgcaagcgccgccgccgacggcgtcctcaacctctgggacgcccgctcaggtgctcacgtccgcgcgctcgacggacacaagggccaccggaagggtgggtccgatcgaggtgttcagcgcaagcaacggtccggctgactcgctctctgccctcgcctctgaccccggctcggccgccgttcaggcatcaacgacctcgcctggtcggccgactcgcgcctgatcgcaaccgcctcggacgacaagaccatccgcatctggtcggtcgaggcagtgcgttttcagtccgccgacatcgatgctgctgggtagcagggcgaccatctgcagcaggcggcattcgacgccgagtgcatcgagcgaccgcgcagctcggcgtggtcggcctgcagaccaacgccttcccgtgctcgcacccaagctgaccatctccgtctctactctgtgtcgtagggcaaggctgtccacggccgactcaagggccactcggctgctgtcctctgcctggcgttcaacccgcagggcaatctgctcgcgagcgggtcgatggacgagcgcctgatcgtctgggacgtccggcagggtgcgtcacccagtcgttccacttggtactcatcaacctgctgtcgttcgctcacacctcgatctgcctctctgccatccattccaggcctcgcacaccacacgctcaatgcgcactcggacccgatctcggccgtcgacttcaaccgcgacggcaccctcctcgtctcgggctcatgggacggcctcatccggctctgggacagcgcgaccggccagtgtctcaagacactcgtccacgaggtctcggttccgcttgcctccatcgcctttacgccaaacgcccatcacctcctgtcgacaacgctcgacagcacatcgcggctctggacgttccagccggccaaagtcgtcaagacgtttggcctcggcgggaagctcggcaacgaccgcgtcggctgcgggaccgtcgtccttcgccatccgcgatggccagccgctgagcgggtgacggacgccgctgcgaacgctgaggggtcgcaacgtccgtcaggccagccgcagccgctcaaacggccagacgaggtttggctcgtcggtgggaccgaggagggccgagtcgtcggctgggagctccagagtcgaaggagagtcttcgacctcggcaaagtccacggcggtgcgtcttccccttttttgccggccgtcgtcgccctggaggctgcgttgcctgctttagcgacttgcctgctgactcgcctcgttcaactggctcttctcggcttcgtgactctcttgattcggcagactcgatcgtctcggtcggcgctcacccgagcctgccaatgattgcgacggcctcggtctcgacagactttaccattcgggtctaccagcttgaccgattatggtcggccgagcgcgaggcggccgaggctgaggtggcggcggcggccgcttccgcaaacgctgtccctcacagcagtccgccgtctgccaatcgacaagaggcggtcgaggatctcgcattaggaggacaggctggcgctgcgcctcccaccgtgccgtctttccgagtcgaccttccgagtccaaacggggcagataatgtcgtctcgggcagccacgcttcaagcccttgtcgacagaacgtcgacgacggcgacaacatcatgcagccgctgccggtcgaggatgcctccccctcgggctcagcgagcctgaagccagcggctgacggtgccagacggcctcccacaggcgacgacgggttggaaggccagatggaggtcgatcttcatggcacgtgaagcgtcccgctgtctggcatcggcggtcggctctctggcgtgacattaaggcttatcaccaagaacaggacatctgtacaataggtggaaagggcggcgagcgagggcccttgcaagcgagaggaaacggattgggaaaaggagacaggagcgacaaagagacgccacttttgaaggcgccacaagcctgcgccgaggacgagacagaaacccagtgagcgagtcagtagagtcgggtgaagattgcaaatggcgaggtgcgactgacctagcgccgctcgttgcggaccggcttccactgccgctcgcggacaacgactcgctcgagcttcgtctccgctcgcttgcgacgaggcggcgacggcggtggcgtgcagacctgaggtactgcatcggcggggtaggtggtatcgccggagccgaacaacaggccattgctgtcgtagtacacgcagtaataggtgtcttgaacgcccggcgcgactacgtactcgcacgcagtcacgcctgaaaggttgactggcacacccagtggtctagtgggcgcgacttcccgcttgtcggtcgggcctgacttcaaacgaccggagtgagccgttaggtcagatgtgtgggacaccagcaagtacttacactggaacgagcagctctggccgtccggccgaaccgacggcgcgaagcgcttgatgcattcgacgccggtcgggccttaaggcagttcggcagtcgcaggcgaggcggccgaaaggaggaggaggccgacgagcgtcgccttggtgagaagggccagcatgacgcgaaggggaatggaaggtggaaggagggccgacgatgaatggctgtgaagaaggtgggtgttgggaagaaggaagagctaggttagctcgcgtacgacgctttttcagcgtcctcgcggcctgtgctgcagggtcgcagagggagcgaacaagacgagcgagcaaaaggaggcttggctgcgccgcacaagtagattatgagacggagcgagcacccttcgtccacgcacatctgggcgtgagccaccagacccaccgcacgacgtcgaggcgggagatcggttgcttctgaaaacagcatagatggcggcgggctccagaggcagcgtcaaccgtctgcgacggacgctgtcggcatgcagccgacgggacgtacgttgcgccggtcgctgcatgctggtcgcagccggccgccgtgctgcctacctgttgactcgacccacgtccaggcgacccagtcgagtcaagggggacaccgtcgttgctgatcagccgctcgctcgccggtcagctagcccggagagctgggggctcgtcgtccggcgggaagcgagagggaactagcacgcgtcactgctgtcgtcgcctgcgcgcctgcgcgcggagactcaacagcccgctggcgccccctccgttggcatctcccgacacactctctgctcgacccgtccacaggcagtcatggcgacaggagcagccggcgacgaccgtgctccgccgctcgtcgaccccgagctgctgctcctcgatcgactggcggctgaggaggagcagcagcgagagcacgcctcgatggcgttgacctctggcgcacctccaatcgcgctggccagcaccaacgagccagcaacggcggcgaatctggccggtcggccgcctcctcagccgtcgacgatggcagcagcatcagcggcgcccggtccgtctcctgctgctgatggcgtcgcttgggtcgaggtttgcgaccggctgaccgcgtcgagtcctcgcctcctcttgctcgcctttcatcagccgcagcagcagctccctccaacgccgtcgccagtggcagcggctctccttcttctcttgaagttgccagcagcacaagcggttcgcgcaagcgcaagggcccgatcaaggacagctatgtttgcacaatctgctcgccgccggtcgcgttcccgacgtcggccaagaaggccggccatacgcaggtcgtccatcaggctcgggtccgagtgacgagcgatgccggcctctgtgcgtcgtcgtcctcgccgactggcgtcccgatcctcctgtcgctcgctgactcccttctgcggccgtctcgctcgcgacgcttcagacttctacgtcgggcgcgacgacgccgaccgggccttctcatgccctcggctcggctgctcgcaccggacgcccaacaccgtctcgttcggcctccacgtccggcacacgtgtcgccagctctggccggcgaccgcacccgacccgcccgaggccgacctgccgaggaacgagcaggaggaggccgagggcaataagcgcaagcggggaggcggacggggtaaagggaagcgccgcaagggcctcgcagaagggagcgactcgacgacgacgacgacgggcgagctcgggccggacacgcagccccaggcggtggtcgaccgcctacggacgctgatcgacgacgtcttgatccagggcgggaccggcgagggtccgaggacggtgcacggcctcctgcggcggctcgagacgcagaggcaggcgctattagcccaagccgaacatacgctcggcctcggcgcaaaccgccaggcgacagaggcgctgcaccaaacgcggcaggcgctcctggacagtccagacggcctcttgacgcgcggatttgtccgatgggtgcgtgccggcttgactgccgtctgtctcctctgcgcttgctgaccctcgccttcctgtctgcagcacgtctactcccttctctcgccttctttcgttggcgtagcccaagaggcactggcccggctggacctcaacagcatcgccagccttgtcctgtcatacctgccattcgcagcgcagggaccgaacgcttccgacgctgctctccgctccactctgctgatggccgtcgctcgcatcgagcaagggtagtctcacctcaagctcgtctgtttaacttctcactgacccttcgcgcacgcccactcgcagccagccagcgctcgcccccggctcgcacccaataccgacgatcgaccagctccgcgcgacacaacgacccgatgacgccgggcgccaacgccgctggaggcagtgccggactcaagcacctctacctctacctcgccatcgcctcgtcgggcgccgcacgcgccgccgacggctctgctggcaccattgggtctggccgagcggccgcctcgggccccgagagcaatcaggcaaaggagtggaagctcgacgcgctggccgatctgctcgacgacgaggcgacgctgccggtgcttgtgtttgtcgggagcgagagcgcgatggacgccgtcgtctacaagctctcgacgaagggcgtcgacgccttcttcatggtgcgctcgattgccttgccctctctcgctgcgactaaccgcaattctcgaggggctgacgttgacttcacccgtgcttcgcagcaccccgggatgaacacccaagcccggctcgccgcgctcggcaagtaccgctcgccagcctacaccggccgcggccgggcgctcgtcgtctttgacctgcacgtcaagccggccgacgtcggcccccagcggctcgtcgtcaactatgacctgccccgctcggtcgagggctacgcccagcgcgtcggcagcgccgtcaactcgaacggccaggggagggccggcgtcgtcgtcaacctcatccaggcaaacggcggcgacgtcgagatgctccggtcgatcgaatgcgcttacaagttcaagtgctccgaggtgcgtcgtcgcccactttggccccccgtcttcaggctgcagcagccagcggtcgactgacgaagccctcgtttttgcaggttcccgtcaacctccgcgaggccttttagaccgggcgtcattggctctcgcaacccccagttatcacccgcccctcaaatgtatttgctagcccgtccgcagcacagcacgcaaccactcccgttcggacgaggtttcagagccgtcttggaaaggcctcgtcgcccgaaacctgactcttacactgtatcatcctcgcctagtctcaaatatcaatgcgctaaagcatcatgcaacgggggagacggcggggagagcccatgagccgcaattcgaaatgcgcaggcgtcttgcgctagagggcaagagggagcaagacaagagagaggagtgcaagagcaaaggcaggagcgaaggagcgagcaaggcgcggcctggccgccgctagcgctcgacgagtccagcaggctcagcattcgggctcgtctccacaccgtcgtcgatgtcggccgactcgtcatggcctgcgagctcgctctcgttgagccctgcgccgcctggaggcggctcgtgggcgtcggcgtagagcgactcggcgtgaggagcctgttcgtgctcgtgcggctcctcctggccgggcccactgacgccgtcgttctccgtcctcgcccgcttaccactttcgctcgtcgacaacggccccgcaagcggaccgaccgtcccgacttctgatcgcttgcgcttgctctcgccccggcggcggatctggcccgcatacgcgcactctgcgccgacgccggcctttgtgcaccgctcgcacgggccaggaggcggcgtcgggcagcggagcttgtgcgcccggcagcgagcgcaggcgatcggtgtcttgggcgggacgggcggcttagcgtcggtcggctggccaccgccggctccgaatcgagatggcgaggtcgagccgttgagagaagggcctcccgtcggcgctgatcgaccgtcattgtcggcaccgacgctgagctggctactgaagacggccgacgatgaggttggggtcggaggcgccggcaggtctggcattcgcgtcgccgtgtgcgacactgaaagccaggagggggacgacccaaagcgtcagctggcggcggcggccgtctgaagactgttccggaaggacgcacgcaagctaagctcgtgcgagtcgagtccagcaaagtcgaggaggtccatcgcctgcatcgagctcggtgagaatccgagagcgtcgccggccggcccgcctgttgggggcggtagacgcccggcgctgccagggttgccggccggcactgccgatcctgaccggtcaccgacgcccgagaccgacgctgtaggggctggtacgagggcagggtcgatcgagggctggtcgtgcgcgtgcagctggtgaagcggggcgtgtgggtgcgaataggcggttcctggcccataatttgacgggccggcctcggcgttggcgtgggcggcgaggacgtcgccgttcacttgttgatgcacggcttcgtggtgcaagccgtaggacgggtgcgtctcgctgccggtgccgggcgtcgacgggtacgtctcgtgatgccagtcgtgctggcctaggtgatgaagggcggcctgaccattgccgctgccgtccgcgcccgcatactggcccatgaccgacgagccgtccgccgagaccgtgccagttgggccgccttcagcgctgccgccctgctggccgccgtcgccgcttttgcgattcttctttccgagcccgcgccggcgaatctcggcaacgtactcgcacccgcccggctcgtctatcgccagccccttcttcgcgcatcgttcacacggccggccgcccgagcacttgagcttctgcttgcggcaccgggcacaagcgatcgggatcgtcggcggtcggggtgcgcgcgacgaggtcgacgcgccgccgccttccgctgccgagttgtccggcccgaggtggccgctgccgtcgctgacgccgccgatgccggcaagcccgttcccatcgagaccgcttccgccgctgttcatcgtcgcagaggttgagggcggatcgggcagggcgtcgagcgcggcttgatggtcggacggcggcgcatgatggagatgatgctggtctgggtagccggcatgagcgtcgaacagatggaaggcgtccgagccaccgctcgggtcgaggtcgctaccaccccctcctgaagggctcagtcgccggtccatgagcccatgctgctgctgctgctgctgccccagatggtctggctgctgttgctgaagcgggtgctgggacgagtcggctgccgtcgagagatggagcggcggcggcggcggcggcagcgggtggtggtgctgagcgagtgcgagcaggccgccctcgccgtggtcgtcggtcgggctgaggccgagggccgggtcgagcgcgttgctgtccatcgaaggcgggttgggacaataggggaagcggtcggtcggaggctgatggctgctctctggacgcagtgtcggctcggtggcaagagacgaggggcggggcagggaggtacgccgacggggtgacttgggctagcctcggggtctgctcgatttcgtgtttgggctttcccgccgcgtcgccggcccgcgcaggcttgctgctgctctctgtcagccctcgacgaccagcccgctctctcttccccccttcccggcacattctccccttatcaaatcagcagccgcagatgtctggacagggcgccaactacacggccggcatgggccagaacggcggcggcggcgtcaaccacgagcgctttgtcgcccaggtctacctctgcgccggtgcgtcctcttcgttccgctcttgttgaccttgcggacctgcctagcccaatacctcggccaggtgcactgccaactggcgactgggcgggtatgagagcagtttggtgttgtcgaaagccgggttcacgctcctctgaggaggcgccgacgctgactgtccttcgacctcgacctcgaccccgaccccttcagactgcgccgccgagaactcgatcaagattggcgagcccatccgttgccgcgagtgtggccagtgcgtagcatgcagctctggtccttgcttgcgtctcgaaggctgacagtcgtgcatctctgtttaccgccgccgctcgcctcaacctgccttccgcctcttgccagccgtgtcatgtacaagcctcggacgaagcggagtcagtgcagcgatacctcgccaggttgctccctcctgcacttaatgctgaccgtttgctgcttgccgatccgctccattcagtggtccgtcgctgcccgtccgcatccagaaccgcagccaggcgagtattgctgacggccgtctcctccgtcctgcaggtccagttcgaggcccgctagtctctcggttgggctcaagcaccgctcggatcgcagatcgctctagactcagaagctagaggctcgcaaggaccggactcgccctgcacgggccgctcgaggggagggcagacccagagggcccgctggcatccctcgcatgcgacgccagtgcatcgttgcccctcttttctcctttctctccgcacgcttcacatctcctcgcccattctcccaataatgaactcatgaacagctgtcggcactctgaggttggcacgagggggtgcgggtcgggtcatgcagactgaccaggtcggaggcggagttgtcgacggcgtcccccctcccggaccgaccggctcttcgacgtcgccgctgctgcccgaaccgacccctcaacgctcacccctcaaacctcgcactcccctctcgccccaagtcgtccaagctcaagataaacctcagcgactgggacatgacgcctctcggctcgcccaacgcgcggtcccgccccggcagctcgcccaccgtcgctgcgcttcgtccgccggccgacgtcgacagctggggcgcgacgccgccgcgcccaagaccttcgcaagcctctagcagcagccatggcggcggtggcggcgagcggcctcggccgactgcggtcggcggatcggtctcgtctggattggacgggtggggtgcgtcgctcctccctgcggccttctctgcgcactcgggcggtgggagcgacggaggatggagcgagggacctgtcggcggctcgaacggcgatggctgggcctcggccggtgtcgcccagagctcggctcaccaggtcaacgagttgggcggagggcggggcgggggccggtacgtcatcctgtcgccgacggagtcgtgaacccttgcagggcgctgatgtcgagaatcgcgccaacaggggcagcttcggccgagctcgcggtctcggacggggagcgggcagctctgaccggtcgttcaatgggagggcagcttctagcccttggggcgggtcgtcgccggtccgaggcacctttgccggaggacgcggcccaggggccggacggacgtcggtggaggtcaaggcgacgtacatctgcgcaggtacatcggccctcttctaaccgtcctcagaggggctagaccgactgatgctcgcccgaccgtacacgtctcttccggctcgggcagactgcgcggccaagctcgtctggcgcaagaacgccgcacaggccgacgaggagccaaaggagaccaagctcatgtgcgcagagtgcggcaaccacgtgatgctcaagccgcggaagaacgtcagtgcgtacgacagctacctggtctccgtcaggcgtctgtttggcgaacagcgctgacgcacgacccgcgtcctcacattcgtcttgtccagccgtacggcctggcgccctctcaagtccagcgcaggccgtccccttgactgacgggctccgtctccctgctacagatccagtacctagcccgctaagaatcctcggctcgcagccctgatgcgagcgcgtcctgtctcggccctcttgtcttgtgtgtcccgttcgccttttcccgtccgcccattcatgcacccttcctgctctcggcgaaggcgcacccgcaggcagtagacgagacagcaggtcttcatcgatcacgctcgtcgcccgtggttgggtctgcgaggctgcgcgtacgcattagcgctgccgcccccttgcgtctgcttgctaagccggcagagttatgcaatcagcgacttgcaacgaggcgaagcgaggttgttatagacgagcgtacaagtacacacagggcaagagctccgtctcggcagcggtttggactcgtctgcgtccgctgggtcgtgtctgcgagaaggactgcgagggtcagctagtgcccaagggccgatccctccggtacgagcccgacggacctgcaacatctcgcgctcttcaggccaccgcggtctccttcgcggcgtcccctctgagacgatacaattcgcctcccggtaggcagattgtctgccggcgagacatgcgaaagggggcgggcctacaacgtcctcgtctgcgcgagccccggtgtcctctaaccttctaggccgaagcctccttgttggcggcgagctcgtgctcgaggccctcgacgagccgggcaagcaggctaccctcgacggcaccgccagctcctccacccgaaccagcgtcctcgccctcgccctcgacggccgcagacgacgcgccggcttggccgtcacgcgcccgggcctggaatgcctcgaggaaggccgcgaggtgggcgtgggcgtcggccggcgacagcggctgggcggcgagcgtctggaggtggagcggcggctgcaagagacggtccatctgggcaaagactgcttggcagggcaaagagtctgcggtcgaggtcgttgaagggtcgctcctgctgctgctctgcccgaaatctgcctttggcgcacccgcgctgcgctcgctccgagccgtgggaaccctccactcggaccccctcgctctcgagctggcctctcgaactccccttgcttcccgaatctctctctcgccctccgtccacattctccctactgcccctgtggctcctgcatgcacttcaccggaatccggtcgacactcatcagaggctctgcgttacctttcccgccggtcctcctgcgcactagcgtccgctccgcctcgagctcgtctgccggagtctccgacgcgcttcagttcccgccgctgcggcccttgatctgtggtcgatcgaagtcgcccagtcaggcagcgccacctccaggttcgacaccgccaaccgctttcggtagacgcccgcaaaggcctcctgcgaccatgccatcacacgcccggccgactcaagagcgcccgccgtgcccgtcgaacgagggcatgacggtcctcgaccggaccaagttccgatcgacgctcgacgtcctcgccgtccgcgtcggtgtacgcgaggttggcagctttcagcgcgagactcagcgcgtaggcgacggcttctcgctgacgggactcaagtcggtgcttgcggacgagactgcggccgaccagaagtggtgcctcctcggcaaagcggacaagggtgcgttcttcttgcgctctcgcagctttgggtggcaggcaccgctctgctggtctgcaagtatgctgactgccgtggtcgaacttttgcttggccatagagaagcttgcgccggagtcgaggaagctgctcgagggccgcgacgtcgagacgcggacgatcgacctgacgtacgacttctggtcgccgtgtgcgtgcctcgctgcccgtctggccgctcaaccgtttactgatgtgctttgtctcgacgcgaactcgcagctgaggtgatccacagcatcctgccggcggagctccgggacgaggcgccgcaaggctttgcgaaggcgggccacctgagtgcgtacgctccctcttcgttcagccatgtttcgcgctgatcgagcctctcctatctctctgcagtccatctcaaccttcgagaccgttacctgccctataagtttgccatcgccgagatcctccggtcgaagaatgccggcgtccggaccgtcgtcaataagctcgagacgatcaatgagagcgagttccggacgttcccaatggaggtcctggtcggcccagccgactttgaggtgacgatggtgcgcccccttgcgactcccgtgactcggctcactcggtctgctagccggctgacactcagagcaacccccccccctgcccttcccgcctccctctccctcacaaaagtccgagtctggctgcgagttcaccttcgactttgccaaggtctactggaactcgcggctctcgcacgagcacgaacggctgattgcgctctttcagaagggcgacatcattgccgacgtcatggccggcgtcggcccgtttgccgtcccggccgccaagcgcggttgctttgtctttgccaacgacctcaacccggagagcacgcaatggatggacgtcaaccggcaaaagaataagattgcggctgacacgctccggatctcgacgctcgacggcaaggcctttatccagcgcgtcgtcggccaggtcggcaccgagtccttccagccgctcgagctcaacgcaaagggcgagccaatgaccaagggcgaccgcgaccgcgatctctcggctcggatcaagaagcagcagacgtcgaaaggcggcgagcgcgccgttagcccgcccgcggcgcgaccggccgcaaagctccttcgaccgtcgtcgccgtacatcaagcatttcatcatgaacctcccagccagcgccatcacctttctcggtgctttccgcggatcgtacgcagctctgccagagttgagcaggcaagcggtcgagatgccgatcgtccactgccactactttaacaaggcgcagctcgccgaggaccacacggaccagaaggccgaaaaggcgctgatggaggtacgttcctgcctgctgcggttcgttttcctcttgatgctcgaccggctgacacccccttgctgctgcagcttgcctcgcaccatcttggtcacccgatcgatgccgcgagcccgggcttttacatccacaaggtccggctcgtcgcgcccaacaagtggatgtactgcatcggctttgcgctcccgcgcgaagttgcctttgccgaggattgaatgtcgtaccgcatgcgacctgtctgggatgactgcccgccaagtgaggcgaagactagatgatccaggcgagaggcaggctgcgtaagtggatggagaactaagaatgcttgttcgcgctcagaaagagaccggcacgcacggtggtcaacggcgccaatgctctgctgccccgccacctggccccacctcgctcacttgtcaccccaagagggccgagccggctggcagcaggtctgctaggctaaccacgaccctcctgctcatgccccggccgctctggcctctgtcgacgcttgctgcctgctgccgtctcgtctcgcctccgcaccacctgctccggacgaccgttaccgtcgccgctcctgcctccagctcgcgcttgctcaacaacgctcgtggcacacgacctctgcctgctctccgacgcctgatgacgagtgctccggccttcgagacggctccgccgccagctacgccggacgaggtcgcggcggtcgagctcgctgcggtcgaaagccgctaccggccctttctcgccaaggctgcaggcgagaccgaggccgacgactggacctcgacgctcgagctggacaccgtccgcgagatggtcgaggccatcggacctgatggacctcagctgaggatcctcgtcctttacggttcgctgcgagagcggtacgtcctctcatgtcgtcggcccgaggggcgggccaagctgaccctcaagacggtcgcagatcattctcgcgcctgatggcctacgaggccgcccggatccttctgcgtctcggcgccgacgtccgtgtctttaaccccagcggcctgccgatgaaggatggcgtctcggaaaagcacgctaaggtgctcgagcttcgggctctgaccgagtggagcgacgggcacttctggtgttcgcctgagcagcacgggaccgtcacgggagtcttcaagacgcagatcgactggatccccctgtcaagcggctcagtgcggccgacgcaaggccggacgctggccgtctgccagattaacggtgcgtctctcgtttgttctcttgagagggtgcattgactgacgcaaaagagtgcgggcttataccaggcggcagccagtccttcaacacgtgagtctccaattgctctcctgctcccctgggcctctgccgatcaaagctgaccgcggaccgcccttccagtgtcaacgtccttcgccagcttggtcgatggatgcggatgtggacgatcccgaaccagagctcgctcccgttcgcctggaagtcgttcaccgagcaggaccggctgatgccgtcctcgaatcgcgatcggctggttgacgtttgtgaggagctcatgtgcgtgcgacgggacggcctgcctgcattccgcgtgaggttgcggccccgactgactttcaacgatttgcctcctttcagcaagacgacgttgctgctgcggccacacaaggatctgctcgacgaccgcttttcggaacgggaggagaagcgggagtacggccggttgaggacgcaagcggagcagcatgccgtcaataagtagacgggggtctgcgttgatttacattaaattggtctcttcgaaggagggcgtccagagcctcagcagctggcgcagtagccaccgctgccccggttgcaaccccagcagctgacgaccccggcgcccgccgacttcatggcgagcccaacgattgacgtgaggccctcgccgaggacaaatccagaggcgatgacgataactgggtaaaggatatctgggtcagcgctctatgcagcgcagctcgatcgagacagccaagcagggcgtaccgatgaggggaactttgccgttgcgcgagtagcggagcgcgacgaaaccgccgagcagacgggcgatggagaagctcggcgtgttcaggaagccgattgcgctgaggggtgaagtctctttagcccgagatacgtgcgggacagcagcgacactgcgaagacgcacaaggcaatgccgctggggatgtgcttgagccagcgcggcggatcgcgcaggagaatcggtcccattgactttgtgaaagatgtcagggcaaagagcataccaaatagaaccataaacatcggagccttgtcgggtaggtgacccgtgttgagcaggcgggcgaggttgagcctgaaagaggctccgcgagggcgtgatcagtgaccgaccaagcggaatgaaacaaggcacggagcgagcgtaccagatggcggccgtcgggacgcggaaggccggaccaggaatctcgtagaccgacttgtagagcttgtaggccgccgtcgagacaaagatgctcgcgagcgagccgatcatctggccgtaaaattgcgaccgggggctcgcccgaagaagggcgcctgttttgagatcctgcatcaagtcacccgcttgctgagcaccagcctcggcaacaccgcctgaacaccaagaccgagcgccagaccgtcaattctggcaaccgcagagaggcagagtaggtagggttcccgcgcaccagcgatgatgttggcgacaacacggcccggctgcaagacggcaaagagcagctgcgaaatcttgccgatgccgctgacgggattcaggtcggtctcgccgagagcacgaacgctgtgcgggatcgaggaagtcacgtcagaaggagggagttgatcgggcgcaacagaaagctaggtggtaggctcacccgagcagcgagagcatgcacgccaacaagaagccaatcgctgtggcccaggggctgatcgtcttgctcccaaagagcgcccagatgatggcgattccgccgacggccgaggagccgaggccgatccagacccaggacatcggcaccagccggtcgtcggactcgtactcttcctcttcgtcttccagctcctcggcggtcggaacgtagtcgatcccacggtcgtcggccgacgcaaacagcttggaggtcgagcgctgccgccgatgcgacagtacgacgcgcagagacgaaaggcagatcgggatgagagagacgatcgactcggcaatctgcaggggaaagaaaggtcacgacgggcgaacaagccggcaactatgacgagacattcggctcaccatgatggcgagtgcaacccaaaggatccagccccggccgccctctgcgtcgctgaccttgcccagcgcccagcccttgtacttggctaaaggcgcaaggataccccagccgacgagcatgccgagattcatcgacagtgtcactggaaagcccatgatcacgccttggccgatgtacgagagcgagggcgagaagctgcgggccagaccaaaggtcaatgaagcgagggccgccagtcagattttgaaagacgcacgtccagaggtagtcgctcgccaagttgccgccaaggacgtcaaagacgggcatcgcaaagatgacgggaaaaagcagactcgcgaactgcgcaaaaggggattcacggctcggttagtccgtgtcagggggtgggtccagaggctgccgactgactgtgaggcccgagctggccgcaaagctgaagccaagggctcgccagcccgagttgcccatgctctcgagttcgacgccctgctcttcgtcggcaaactcgtcgacgttgaaggcgtcgtcgtcgtcgtccgagtcgtcctggcggtcatgcacggtgaggggccggtagccccggcgttggcgcggcgcggcaggagctgatggtgacggttcagagtggaggaccgcaatgagctgcgcggttgccgttccggacgggaagacgagcttctccttgacgatctgtcggacgcggcgggatgagagtcaggggtcgagccggagtccggcgtgattccagccagcaaggcagactgaccacttggcgccgtagaggtgcggcaagaaagacgctgtagatgcgagaggtatcgtcagcgagcgacaaggacgacgaggacttcagcacttcgacagagtcgtacccgaagaaggcgacggcggcactccacgccataagcgagccccagccgaggaagatcggatgctcgccgtcgcgctcaaagtcaagcatctccattgcagggatgatgccgacaagaccggctgcgagtggcagtgtgccggtagcgacggccgtcgtctgcaggacgacgttctcctgaggcgtgaaggcccgggtcggccggatggccgacgggagtgggaggcgcatcaggccggcaaaaataccgtacccgagcagcgccgactgaagcgacatcatcgaaatccagccggtctggaggccgaagtagaggttggtgaaggctgaaagccgacagaggagtgtcagctcggaagcacgtgttgcaaagcgagaggatcaagcgacgacatacccatcaggcagccgactgcaagcaaagagagagagagaggtcaggtcagtcgcattgacatcagattgtcctcttgtcgattcagccgacgcacctaggagaccggctgagacggctcgaaaggtgaagtcgccctcgatctcgcctcggtcgtcgtaggcgtcggcccgggtgggcgcctggcgcgctgccggcagccacgagctgaagctaaggtcgctcgaaagatgatcagttgtgcgacatgagctgaccggctgcgttcttcttcaacgcacagagatgggctcatgctggacctgaacgggcggtcgattcgagattcagaaggatgaggtcggagggcagacgctgctgacctcgcctgcccggagttgtccgccccgtctgccgcgtccgaagctcgcttccgccggcccgctagcgctcgctggccagatactctgtcacgacgcggcaactatagaatatgaatgcatgcagcaaagaccagctcacagctcagagctgcgagaacaagtcgtcgaccgggacggccagggggccacttcaagccgacgcagcggccgccctcgtctccttcggtcccgctgccgccgcccgcgtcacactttccgagcccaaccctccgacggccatcttctccctcctcgcttccctcttatctcgacgaggccctcctccgaggctcttttgtagcctgcttgctgtttgaacctattttccctgcctgcaactatcgccgacctcatggccgacctgacggagttcggcggcgcccttctcccccggctcgtgcgttcagcccaccggcctctcctttcgctctgaaaggcgcagctgacgtgccgtccggctttgtgcagcgggccgccgtccgtctactagagccggcagtcgtctttccgctcgaggccaggccggcctggtcgatctggaactcgccaatgctgttcctgccgctccccatcctcctgctgcagtcgtacctgctcttctcgccgagctcgccctcgcacaacgtcaacctccggctggctatcctgcccctctcactgctcgcagtcctccaactcggtttcgcgcgccggatggacgtcgccaacgactcgcatctgcgcgactttaaccagctcggctgcctctatagcctcgtctgggccggtcgggctctcgagctcggccttcggtcggagcccccggcctgggtcggctggacgggcacgcaagtcgccgaggtcaagaaggccctcatcaacggccacagcccggccgaggtcacaaaggagcaacgggcgacgacactgtttaaagtcgacccgagcggcgagggcacctggttcggcacactccgcctcgcgacgcggtacctcttcagtgcgtcgacccgccccgcgctctctcgttcgtcgcacgcctcggttgatgctcacaccttgcactctcagccatgcgcaacctcggcttctccccggggctcgctcccactttcttcacccccaagccggaaccggtcgagcgctggacggccgcctggcaccaggcgggcatgctcctcagctgctacctctttatcgacttcctcatcctacccttttcctttcactccgactttcgcacggtcgccagcagccagcgcggtagcctctacgccccgctcggggcgcctttcccggcgggcatcccgccctgggtttcgacaatcgtcctgaccttctgcatgggcgtctcgctccacgtcggtgcgtctcgtctttatgatggctgttcccgatgagaggtccgctaatccagatcctcggccgtacaaatcctcgcgcagttcaaggtctgtcatcaaccttccaagtgagcctccctcgtcgtgcacttgctgaccctccctcaatcctttcgacagtcctgatgttccacatttgtcggtccctttgcttttagatgcacccttcctcacctgctgactctgcggccgatcacagtcgctctgccctggatcgtcttcgcgccctcgccgatggcatccctctactggccgcacctgttccagcacccggaaggcacgacctctctgaccgagctctggagcctgcgctggcactcgttgttccgcgcctcgctcggctactgcggctacgactttgcgaagtaccttggcgcaccccgggccgtgtctgtgtgcgtcgcgcctcgcttcatgtgggccccgacagaggctgatcccttttttttcgctcttcctaggatggccacctttggcctgagcgcgctgatgcactgggttgccatcgaggcgctcggcaagggcccagagtacggcccgacttggccgctcgcgcgcttcttcctgatgcagggcgtcggcgtcctgctcgagggcgcattcagggcagtcaccggccggcgcaccaagggcctcctcggtcgcatctgggtgtggtcgtggatctttttatgggcgccgtcggcgatggaagtggtcagttccctcgttccacttggcctttgcgagcgcaaagttgacactgcttccctttcgtcccagtacgcccggcgcggccagacggagagcatggcgctcggcagcctgagcgccggccggcccgtccgctggttcgtcctccggctctcggacgtctttagctggggtcttcactagattgcgcagggtctgcgcggagatgaaaggatgcaatgtagttccctgccagaaagtcgaaacaaaagagctgccaagtcgtctgcagatgcgaccgttcgccgccggagagacgcgcgcgagcctcgttgtgtcgagcctggctctcgctcgctcgcctgagccatctacacgcaccctccctcctgctctgccccggtcgtttcgtttttccctttttccagcggtcgctcgtggtccgcattcccggcaagctcacgaccgtaccgtctcgccatggcctcggacgatcaggagccgcccatggaggacgtcgcgctcgacgccgctccagccgccgaaccgtcctcgtcttctcccgctgctgctgccgacgccgacgcgacccctcagccggcccagcagcccttcccggtgcaagcgccgagctctgagccggccagcgtagaggtcgattcatcggcatcgtcgccgcccccgccgccgccgccgccgccgcccaaggaggcaaccctggtcgcgcccatcgcgccgcttggcgtcgaggtcgtcggcccgtccgaggctgctgctctcccgcctgccgaaccgtcagcctatgcagtacagccgcctgcagctcctgcggagcaggtgtcggaggcccctccgccgcctcctgaacggaagaactcagcctcgtcccaggcgagcagccggccagcccccagccggggcccgtcagccctcgaccggtcgcgcaccggctcgacctcgacaatctcgtcggtcccggcctcgtcgtcgctgcatcagcatcggggctcgctgagcacgctgccggcgacgacgctctcgtcgatccacctcgtcaccgcactcaaccagattggcaccagcaaggaggcacgccggtcgccgccgctgcagaaggcgattgcggcagcgctcgaggcactgaagcaggccgagagcacggaggagccgatcgaccaggcaatgattctcgagccgctgcgactcgcgtgcgagacgcggtcagccgtcctccagagcacggcgctcgactgcatctcaaagctcgtcagccactcgttcttccacgccggcccggtcgacgccctgccaagcgacggcgccgacgacgcagctgcggccgaggtccctcgcgcccagaacgccgtcactgtctcggaccacctggtcgccatcatcatctcgacctacacgagcgacgggacgccagacgcggtcgcgcttcagatcgtcaagtcgctgctcgcgctcgtgctttcgccccagacgccggtccaccactcgagcctgctcaaggcggtcaggaccgtctacaacatcttcttgctctcgtcggaccccgtcaatcagatggtcgcccagggcggcctgacgcagatggttcaccacgtttttggccgcgtcaaagtcgagccgggccagctcggcgttgacgccgcgcgcggcctgctccattcgcgcaaggactcgtcggcgactattggcacgctcaacggcgccggcacgagcggccggacgaccccagcagaggctggcctcggcagctcgaccgtctcactcggcctggacggcgctggggatgagcctaacctccggtcgtcgacgcccgtcagggagctccaggagggtcttcgtcagccggtcggcgagtcggcaccactcccgccggtcgaccgctcgaacggcgtcgcctcgcccctcggggggcacagcagcccgcccatgatcatcctgttcggccccgcaaagctttgatcctgccaaccctcactgacacctgtggctgctattttcttgctcaggtcttccgacgagcccgtgcagccgccatcccggtcgcagacgccaaccatccggcgcaacggcgatggcgccgaggatgacgaccacatgccgctcaccgagcaggagatgtttgtcaaggacgccttcctcgtcttccgcgcgctctgcaagctcacgatgaagcccctgatgacggactcgtgcgtcccaactggctgctgatcggcttctcgcaccgtcggctgactgcgccgcgacgctgctactcctctccccttcgcagtgacaaggacatcaagtcggaggcgatgcggtccaagctgctgtcgctccacctgatcctgacgatcctccagtcgcacgtcgcgctctttgcatcgccgcacatcctcattccctcgtcgtcgccggtgcgggcgacctttgtccaagcaaccaagcagcacctctgcatcagcctcagccggaacgccgtcagccccgtcggccaggtatttgagctctgcgtcgaaatcttctggaacgtcctcaaaggtcttcgcggcaagatgaaggtgcgctgcgcccgcgcggtggcctcttgacggcgcggtcgtgactgacacaccctctccgccccgatcgaccctcgcagaaagagatcgaggtcctcctcaacgagattttcctgccgatcctcgagatgcggacgtcgaccatcaagcagaagtcgctcatcctcaacgtcttttcccggctgtcgcaagacccgcaggcgctcgtcgagatttaccttaactacgactgcgaccggacggcggtcgtcaacatctacgagcgtctcgtcgagattatcgccaaggtcggcagcacccactttgctccctcggcctcgggtaaggacgaggtcaccggcattggtggcgtcggccacaacgaaggcggtcgcgcaggcgcgtttgacaaggggccggtcatcccgccgtctctgacgacgtccgccatgtcgggctcgaatccggggtcgacccccagcagttcggccagcccgggcgcagcgagtgatccggcttcggccctgccttcgcagcacctggccggccacgctgcgctgtgggccaacctgccacccgaggtcaagcttcggaggcaggcgctcgagtgcctcgtgacgatcctgcgctcactcgtccagtggggcatcgtcgctccccgcggcaacctctccgagagcgagtcgcgccgcgacagcgaggacatgcggagggaaagcacggccgacggcgagggtggcgccaggtctggcggccgggcgacgcccgcccaggccggaccgcccggccctgcgcgcgaggacgacccagagacgttcgagaacgccaagcagcgcaagacgacgctgatggagggcatcaagaagttcaactcgagtccgaaaaaggtgcgtcccgtttgagatgaggcgcgggccctcttgcgcccgagtctgacccgatggagctctcacgtagggcgtcgctttcttgctcgagcacggcttcatccggagctcgacgcccgagaacattgctcgcttcctgctcaagacggatgggctctctaaggcccagatcggagagtacatgggcgaagggtgcgtttccctctttctgtaaaactcagcgtcggctgacgagattgttactgcagcaacgaggccaacgtggccgtcatgcactcgtttgtcgacctgctcgacttccggagcatgaagtttgtcgacgcgatccggaccttcctccagtcgttccggctgccgggcgaggcgcagaagattgaccgctacgttctcaagtttgccgagcgctacattgccggcaacccgggcacgacgtttgccaacgccgacaccgcctacatcctcgccttttccgtcatcatgctcaacacggacgcccacagcaaaaacatcaagtcgcggcggatgagcaaggaggagttcttcaagaacaaccgcggcatcaacgatggcgcgagtttgcccgacgactttctcggcgaaatctacgacgagatccagacgaatgagatcaagatgaaggacgagattcaggagccccaggtagcagccgcaccgggcctagtcggcacgctcgtcaacgcgcggcgcgacctgcagcgagacgcctacgtcctccaatcggagggcatgtcgaaccggaccgaggtgcgtccgcttggcacgaggtctcagaagagggccaggactgaattcgccccgctgctcgcccccctgctccccaaccactggcaggctttgttcaagacgctgctccgcacccagcgccgggcgggcgacaagtcgagcgagcagtactacagcgcctcgcacctcgagcacgtccggcccatgtttgaggtcgcgtggatgcccttccttgcggcgctctcgggcccgctgcaggagacggatgagctcgacgtcgtcgagctctctctcgaaggcttcaagcacgccatcaagattgtctgcttctttgagctcgagcttgagcgcaatgcgtttgtctcgacgctcgccaagttcaccttcctcaacaacctcagcgagatgaagacaaagaatgtcgaggcgatcaaggcgctgctcgacattgccgtcgctgacggcaacctcctcaaaaagtcgtggatcgacgttctccgctgcgtcagccagctcgagcgcatgcagctcatctcgaacggcatcgagacgcccgatctgcggcggacgacgtcggcgtcgtcgaggaagacgcagggctcgcggacctcgcggcacgggccgggtgaagacgtcgcgctcgagagccggtccgcccaggtgacggtcgcgtcagacatggtcttctcgtcctcgcggcacctctctggtgtaagtcgggccaccggccttctcttcaacagtgcgaagcgccctgttgctgatctaactttcttcacgcccgtccagtcggccatcgtcgagtttgtcgaggccctcggcgccgtctcgtgggaggagatccagtcgtcgagcggctcggaccacccgcggctgttcagcctgcaaaagctcgtcgagatctcatattacaacatggcgcgcatccggctcgagtggtcgggcatctggcacatcctcggcgagcacttcaaccaggtcagtcgtcgcccccccttgtcgccatcaaccgccccttgctgaccgacgatgtgcgcccctccaggtctgctgccacaacaaccccaacgtcagctttttcgcgctcgatgcgcttcgccagctggcgatgcgcttcctcgagaaggacgagctctcgcactttcagttccagaaggacttcctcaagccgttcgagtacacgatgatccacaacaccaactcggacgcccgcgacatggtcctccagtgcctgcagcaaatgattcaagcccggtcggacaccctccgctcgggctggcggacaatgtttggcgtcttttcggccgcgtcacgcgtcttgaccggtgcgtcctcgcactgacggaggcgccgcaagggtctcgactgacgccgctctctctcatgctttcagagcgagtcgcgagctacgcctttgacctcgtcgcccgcatcttccgcgaccactttgccggcatcgtccgcttcggcgcgtttgccgacctcaccgtctgcgtcaccgacttttgcaaggtcagcaagtaccagaagatcagcctccaggcaatcgagatgctccgcagcctcgtcccggccatgctcgcctgcccagactgcccgctgagcgagccgacggccggcacgccggccccgagcaccgagatccccctcgtcaacgacccgatggtcaagttctggttccccattctcttcagctactacgacgtcatcatgaatggcgaggacctcgaggttcggcggctgtgcgttctctccttttctcgtcgcccgctgccgccctcctcagccggcgctgaccgagctcctttccgtaaaacacccgcagtgcgctcgactcgctcttcagcacgctcaaggcctacggcgccactttccggcccgacttctgggactctgtctgccaagaggtcctcttcccgatctttgcgccgctccggtccggtcacatggccgaagaggagctctggatcagcacgacaatggtgacggccctccggaatctcgtcgacctctataccttctactttgagacgctcgcccggctgctcgacccgctcctcgagctactctgcttctgcatcgaccagggtacgtccccgagcccttcgccctactttgcgcggggcgcctgaccttaaacccccttcacaaacacagaaaacgacactctcgcacgaatcggcaccacctgcttccagcagctgctcgagaagaatgtccgcaagcttagcatggaaaagtgggagcggattgtcacggcctttgtccagctcttccagagcacgctcgcccacatgctctttgacccgaacctgagatccgagaaggagccgctcgagtcgccggcctatctgatggccagcggtgcgtaccttccttccggacgtgcccgtcccaaccctccgctgacactccgctgacaacctcttccttcctccctgcagcacccgcgtcggctagcggcccgccgccgtcgacgccgccttcagaggaccaaatcgtcggcatggccatcgccgaccgccgacgagtcttccggcagatcatccggaaatgcgtccttcagctgctgctgatcgagacgacgcacgagctcctgcaaagcgctgaggtctacgcgacgatcccgtcggagcacctcctgcgcttcctcgccgtcctcgaggacagctatcggtttgcccgccggttcaacgccgacaaggacctccggatggcgctctggaaagtcggtgcgtcaacaatttcctcttcgctttgggtcctgttggactgcgctgacctagcatgcgctcgccgcacgaactcgtctgaaggcttcatgaagcagttgccgaacctcctcaagcaagagtcgagcagcgcgtcaacgctcgtcaacaacctcctgcgcatgtacgaggaccctcggtccgaccggcagacgagccgggcaagcgtcctcgagcgctttgtcccgctcagccttaacatcctccacgacttcaacgcgcttgacagcgagagccaggtccggcatattgccgcctggagtcccgtcatctgcgagatcctcggcggctacggcggccttgacgacaagactgtacgtcgcagaccgggcacgtgtggtcatcctgctctctgatcgactgacgcgcgccttctgccaccctcgaccccatccgcctgccactagttcgagtcgcatctgccggcgctctacccgctcctgacggacgcgctcggccgggagaacgcgcctgaggtcatggacgccctccgccagacctttgtccgcgtcggccgcgtcaagggcatcgtgccgtcctgaggccgacgcttctcgaccctctctctctccggacgactagacgtaccatcccttccctccatctgctcccctcggtatctcgttctgcgcatcacgaccttccttcacgtcttccccggagtcgcatcgcgtcagccgccccttctggcttgcccttccttgaaagcgcatcactcattcgctcctccgccggttgccgatcttctcgacgatgcagctctgtgggatcggtggacaaaggctggtcagcaacaggccacctccgaccgaggggatgcgaatcaggcgcaccttgtggaaggctagacgaggggatgacgaggtccgaggcgcggtcagcctctcgagctgagcaagagcaggaggagagggcggccacacttccagacggcaggccggtctcgaggttgagcaggacgtagccgagctcgtcctgttgcagcttgcccgagagcatctttccctcggcatcgcgctgcgtaacgatacacggtgccttgagccacttggcgccgatgacctggccgaggaggaggaggaggagaaggaggaggaggaggaggaggaggaggagggctgagcaggtcagcaggcagggacggcggaaccgggccagcgtcgggctcggagggacggacctctccctttgacgtctcaaacttgccgacgtcgtagaagacgatctgatcgccggcagtgtacttggtgtctgcagggatggcgtcggacatagttgaggcgctaaagaaggaggaggccggagagagagaaggatgtggttcggaggtagcggaggagggacgctcgcgcgctcgtcgcgtcatctgctgttggcctcgccgacacccgtcggccggcaggttgctcgtacgtgcgttggagcatcttacagggagtcgcaccacgtgggatatccatgcttagctttatcagtgctcggagtgcttcgctcgagccttggcgagccgggcgtaccgcagcgaagagggctcggctggaccttactcaggagagctcggcgcgcagcagatgcgcgctcgaccgcgtcccgacgacactgccgaagctacgaggcaagcacagacttgtcgagcaggactgcagtgcggtctggactggactcaggaccgcagggtgagcaggcgtctcccaggaacggaggcgatggccgctgctgatcggccagaggcggccgctgctctccaacaatcacaggatcgctcggtttcctcctgtcactccatcctgcacggagcaggaagccctcatcaatgtcacccagctctcaagaaaacctcgacgacgtgctcgggccagcacacttgggcgcagacgctgcagacggggcgagacctagcctccaatttgacccctgtgttcattccctccgccgctgaccggccccattgacgctgtcctgaccggccaacccgagactctgccgaagcaaagagctcgctgacgccgaggcaggtcattctgcgtcacgagaggacgacgaggtctgcggctgctcctcgccgttgtgccttccgacgtcctccaccggggccggactttgcacgccgccaatccctgtcaaaccaaaccgaatgaccacatggtcgcctccctctcggcatgacgtcgctctgacgtcgttcccctcctgcctgagcctctttctcgagcagtcaaaagcaggggtcgtggccgccggtttgcaagctttctccactcaccatcgcttatttacccttcctccccagctcctagcctttcccactacccctctctcagcatgtttggtgctcgcacgtcccacgggaccactcgtctctctactcactctgccggccgtcggggcttcttcagccgtccgcgcaggcagaataaggtggccggtcttaaaggtgcgtttcgctctcctggcgctcgtcggagcatcaaccaaacccacttcttgccctcagagactgagcaggctttccttctcgcttttgaccgtgcctacgaaggcgccatcaataacccgcgcgtcggctcgtctggccgtcgaggagccaagcaagaactcaggcacatgtgcgtcggttctcccttgccattcgaactctgctgacccccccaccctttgcctctcggttaggggcgtcaaacctcctcgcgagcgtatgtcgacgaagattcgccgcatcctccacctcggcggccgctcccgccgttcccgtctctgagcggcttctcgctgcctgccattcgcctcctcttcgcgccgctctgcctcgtccctcttactgtagctctagctttgacataaaactttctgcctcactcgctggtcgcccgtctctttcttgagaagagcacaaggggtgtcagcggcgggtaaaacccgcccagctgcggctcttttgtcttctcgcagtgagggaccggcccctctgacgtaggccagccagatgtcagcgatcggcgaagcatcccagtctattcgagagtcgagacaggcaaagcgtgcggcctcctgcttccctcccctttcctctttgaagctggacgcatcgcatctcggccggccgcccagagagattctccgagcagcagccaacgcagactacgcaacagcagctgcgatgacaacgtcatcttgccggtaagcaagcttgccacgagctgtgcgagccgcccctcgagatcgacctggctggcatcgcgtgcataccgaccgtgtgccgacgacctccagcggagccccgatcaggaggatcgccggcacggacgagaagatctcagtccggcaacaaggcggcgaccaacagtgtgcgtcgtctctcggtcagccagggcaaaatcccgctctgacgccgccgcccgccgccccgactgtaggacgtgccgatcgcggattagagggcgagtgaggccgaggatcgccacttgccggcactgctcgggctaaacaggcaggtatctggtctcttggcctcgagacggatgtgtgaagacaagagtcccgcggcggcgaatgtcatggccgctcgtctagcgaagccgctggtgtcgcaaagagcgaggctgggtcaaagcctggaggaaagacctgccgggcattgatgttaatcctgagggagcgagcggctcgtcagaaacctcagtgagaggacagagcggcaggctgcactctaggccgagcgcacctcgtcgtccggaggtagtcggccatcactgggtcccagctcgaatcgtcctcgatggtcgaagcctcggaaaagtgcgaaggcagcgtgccatcgaggacacgaggaatacctgcatgcaaaagggtcaggcttcggctgacgggcagatgatggccgagacacgtaccgtggtaggatcgtcggctcggcccgctcaggacgatgacgtcgccgctccgaagcaagagcggcagaggtgcctcgtcacgagtcgatccgccgagaagaaagattgccgacaagccgagactggaggaaggaaggcggtcagtttctcctgcaagaggtcgacaggcaagaatagggaagacggacgagaccgagaccagtggccgatgcgggtccagctcggaccgatcgacgtgcgccatgagcgagtcgtgcgtctggtaggcgttgatgatgcccgcgtcattctctgcaggtcgaaagtgagcacggatgagcctgaggttgggccggggcgacgggagagcgctgagggtcgcgcaccgtagttttcggcccagccttgccactcgacagacccgccggcatcgtcggaccgctcgtaaacgctcgcccagtcgatctcggtctttacgatgcgcgccagccgggccccgagctgctccgggaacggtatgcggcgccgaaagtcgtagttcttgctcgaccactgtgagcgccacgcgccggccgcgatcagcaagagaggctgcagcaacgcagcaggtgcttggacccacgtcgtaaaagagaccgatattggtccaccgtagctccttcagtagttgagtgacacgcgtcgatcgtgcactcgtcgacggctccggtcgatgcgagcccgtctgcgcgacctcgtcggccgtcaggcgctcgccctcagtgttctggacgagcgtccgaccggagggcatgcggtcgtattcggccacctgggctgaagttagagatgcgtgccgagggcggatgacggcctcctcagcgggagacgcggcgtctggaagcgatcggctggcgacggccgccgagtagagcgaccagagcgtggctggcggttcaggcaggacgaagtgctgatcgaggttcgtccaattcggaggctgcgtatagtcggccaggcaagagccgaccagcttgcgttgctcggccgactccagataggccgggaggacgacaaggcctggggcgaggatcggccgtacggacgcggtcagcgcagcctcccttaggcaccgccgacggccgccggcaaggtcgactcacccggtatagccttgactgcccaggccttgacgccagcctgaccgacctcaaagcactcgacgccagcgagctgcgcctcgccccactcgccgttggcacgctcgctcggccttggcccgccagcagggaagagttcgcgcaggtcccagacgtctgtcaaggccggccgccagctcgtccctcgtcggcgctgcctcctcgcctcggtgtgcgtgagagtggcaccagccggggggacgcgtgacttgtaacgcttctcgacgagccggaaggccgacgtctgctgctgctgctgctgctgccgctgctctggctgcggccccttcttgcctgctgagctcgggacgaccggcgtgtaggttgcagtagtgacggccatggcgagctgacggagctgggtcgaggggcagctcggcacgcgcatgcgacggacccggtcgaggatcacggcagtgaaggagctggacgaagatcgatgccggagtgagaagagagaggcttgcagcaggagagaaggggctgcgctgaggctggcgtgccgtcgcgtactcattccggcctggcgccgtggcggcccttggctgttcgagcagcataacgcacacgtcgtcgcactaggacacaagtctactgaacgacggcaagatgtcatgctgatcgccaagtcctcacttttggccgaggacgcctgccgcaccggtaccggtcgggccggcaatgtgcgagaacgtccccgcctggaaccatcggtcgttggcggccttcatcttctcggccgcgctgagcgagggcgtcgcaatctcgatgccctggacgggcgtaaacgagagcgaggttgacgtgcccgagagcgagtcggccgacgttgccgaccggccgagcagctgcgttcgcagccggttggctttgctgacctttactgcgacagggggtggggaggagcgggcggggcgcgtcagcgacagcactcgtgagcccggaaggaggcggggcagagaggcgggcacgcacgcttcgacttctcgtcgctcgcgagccggaccttgctgccggccttgccgatcatgcccatgccgatcgtctcgtcgccgtagccgccggcctcctcctcggcctcgccgaacgccatgcggttctgcatcttctgcagctcagtcatcgcgtgcgagtccttctcggcccgtgccctgtggagggggagagcaggagatcagtgtcacgagcagcagccttggcgaggtcagacgagctgctgagagttgaaagacgaaccgttttcctccgcgacgcttcttcttggcctcgtctggccgaggcagggccttggtcaccttgagcggcgccggctccgccaagcgcttgacgtgagcgttgatcttgctcaggagctgaacgccatagctgccgtcgcgtgcgccgcgctcgaggtcgagtcgggcggcgagcgtgcacttggcgccgaccgtccgctggaccttgagccggatctcgggcggcgcgccctggacgacaggcgactggaagatgaagcctgtatgccggagctgcgagtgtgcgccgagcccggtcgacgaagaccgcttggccgcgccaaagaggtggacgttgccggcgggcgtcttggcaaacgccgtcaggccgccggcgacaccgagcagcttggccgccgttgacgtcccaacgatcacagacaggtttggcgcgaggatgttcatgcgcgattcgacgtaggcaaagatctgtgtcggaaagagtgaaggtcgcaagcagggtcagcgcttgccttgctgggaggtctctcgtgagcagacgacctggccggccgcaccttgtcacgcgcctccttgaggctcttggccgcctcgcagccactctgaacgcgatgccactcgtcctcggcgagcgttcggccgcgggtcgcgcttgccgtcatcgagacggtcatgatgacggccggcgagaggacaccctggagcgggaccttggtcaggtcatacgcgttgccgagcgtgaggacggcatgcatgtacggccacgaatccgacacgagctgctcgagctcagggaatcggggcgaatagtgatcgcggatgaactagcgcggcaagatgagggacggctggtcagcgagctggaccgagcgcacgccgaagcaggagggcgacgcatccgcaccttgtggacgatcaggagctcattttcgatgtcgactgaaatgttgttggaagcgacgatcaagctgtactcggggttttcctcgaccgggcctgtcaggtcctttggtgtcgggttggcctggaagtgggcgatctcctgctcgcggtgcgcagcgcagtaagagcgcgatcccgtccgtcagcgagctgtcgagcagacagaagcggtacgcggcggcgaagggagcacaccttgagaatctcttccagtcgccggctcgtcagcagcttggcgacctgccgaacgtcctggacggcgccgagctgcatgcgctcgacctcgtcccggtcgagctcgtccgtcggccggacgccaccggccggcgtcggcaggagggcctccatctcctcgtcgccgtctgggtcctccttcttgaccttgaaggtcgacggccccggtagcgagtcgagcgaggcctcgagcgccgaccgcttggtcggcagcgacggcggcagcatcaggccgccggtcgacgacgatggcccggccgacgaggtcgaagtcgacgcgaccggcggcggcgaaggcgagcgcgaccggtccgaacccgagtcgtcgaggtcgccgaggagctcgtcggcaagagacatggcagactaaggagaggtgtctgttggactgctggtgctggcgggtgagaggcgagtgagggcggccggtcgaggtggctcagccgtcgtcgtgcttgctgctcctggtcgagagcaggcagcctgtttagttgcattgtctctgatgcaggtcgatggacgcccgcagcaaggcagcccgacgcgatgcctccgacccgacgacggcagctcgtcaagacagcccgcttgcttgccagtcgctggcgccgcccgtcgacctctgggccagacgatccagcagcgagcctgattctctgggacctgtcagcaagcaggaccgccctcctctcgaccaatcgttcaccgcccgcctgtcacctcggccgtgtggccccggacccgcccctctgaagtccggtctacagacaaaggggccaagccgcccttcccttcacacgaaggacttccctcgcgaggagctggtacgattaaacgcccgcgccctcctgccggaagcccaccgaccttccccttctcccgcccccaggtcggacccgaccaactgtctcttgacgcgaccaagcttaggcttcgagctcagcccggctgctcggtcctcctcgacttcctccccccctcccctctgactcgacagtcacctccttctctcgatccgcgtcggctaccagctcagccgagcgtcgaggatggcgacgaccgccatccagctcttgtcacctgcgccgctaacgcaccgctcgcggacaagcaccgccggcagcgcgtcgaccccgccctctgtggcggccagctcaagcagtcgtcctttgagcgctgccttcccccgctcgcagtcgttctctggccccggcggtcgatcgccccgtcagaaggcgctgtcgggcccgaccaaaccagccttcctttacacctactcgagcagtttggccgagctggccggcgagacggcgagggcgacagatgggcccgcgagctcgtccgaacggaccgacttcctcagaccaagcagggccggccaccggctcgtccagagccggacgatgccacttggaggcgacgttagcctcgcctctgcggccacgggtggaaacgccggcgacgtcgagtctggcctcccgctgaggcggacgagaaaggagacgctcccggccgactactgggccaaggcaaagcgcgagccggtcgcaaccgacagctcgtcggcctcggcgacggctgacatggtccgccccggtcgccgaggaacggctgacatggtccgccccggtcgccgaggaacggctgctgctggacaatcgtcatcggctgctgcggcgcctgcccctcccgtgctcggccgacggccgacgatcgttgaggagctcgaggccaaaatcgtctttctcggctcggccggcgtcggcaagacgtcgatcatccggcgctttaccacgcgcaagtttgagccgaccaagacgacggtcggctcgggcctgtcaacgcgcaagcaggtcgttgacggcgtccatgtccggctgcagctctgggacgccgcgggccaggagcgctaccggtcgctcgccccgatgtactaccgtggcgcgcatgtcgccatcctcgtctacgacgtcacccgtcgggaaagctttgccgagctcgagagttggctcggcgagcttcgtgagaagggcccgagcgacgtcgtcattcacgtagtcggcgccaaggccgacctcgaggaccagcgagaggtcgagtaagtcggcctttccctcgatccgtctcaccgcatgcgagaaagcctgctgaccacctgctgcacgccatccagtctcccgaccgctcgacgtgagctccgggcctggctgaatccgcctgagttagtctcactcgacccgcagggcgacctgtcgtccgcgctcccgacgccgacactgtcggacgacagcggcagtggcgctggcagcggcttcttctccggccggatccggcgcaaaagcggcgactgggcgtcggccggctttggaatggacccgccaaccccacctgccgtcccaacattggccgcttcagacggtcagggcagcgcccagcccatccggcgcaagagcgaggagtggagccggcgcacacttttgctcggcgacgagcttgccatgccagggccgacggccgcctctacttcggtcgctggggtcgctgctcggcgaggagtgagcttccgtcgtgacgagcaggcacctcatcctccgccagcgacagacgcagacaatgatgccggcctcgaaggcatcgaagtctgggagacgtcggcctcgacgtcgaaaggtgcgcttgcgctcgttgacgctatccttgacctggcggcctgcttgcctctgctgacccgtcttgcctgtttcctcctcaggcatcgagcccctgttcctgcacatcactcgccagctcatcgaccggggcgatcagctggagcgcgaacgcctccgccgggcgcgcgagagcgtcgtgctcgacgacggcgacgggccggcgctcgggagggacgcggcctctgctggaaagctcggcgcggcgtccgcctctgaccgcaagtcacgccggctcggcggcgcctgctgcacgtaagctcttgtgccgactgctgggcaagttgttctgatggacttgcctcgacgccctcttcgaccctcaaaccaccgcctctctctacgcgcacactcttccccgcgcccatcgactcataccccccattcgagccaggagctcctcacgtacgctactcggcctctctacacgactgtatcactgccttttctctcgatacccttcttttcacgaccatgattctctcacccgctgccctggtcgccctcgggcaaggggtacatgcgattttaccgaatattatgcgatccgcacgggactttgccaggctggtcggccaggaccaggcgagatgtggagaactagtctgccgacgatccggtcacagggacggccgaaaaagggccggagggaggtcgggggcgggagcccctgcgcgggccggatcatttcttttacgagattttattggatcgctgcgagaccagcccctttgggtttctacaatccaggataggttgccaaaacctgtctgggagcaatccaatcagatgacggcaggccagccaaggggggggggaggcgggtcccgaggagcgggtcccgaagctcaggtcgctgggctgctgcgcgcgcgcgctcgaccgcctgcttcgactgctggttgtccctcctgctcctccgaccgatcatccacgaacctcctcgctcacgtctccttcactacgagcggcgttctccaggcgccctcctttcaccacaccgacagcggcgacctgctgtcatgctttgggcttttggcgctcgcgcgacagccaagccgcctcccctcgcccgagcgagcttgaccttcggccctcgcgcccatctctcgcgtctgtgctcggccctctcaaagcgctgtctgacttacagctattaatccgcgctctgaatctcagtcacgagccaaagagcgcttgcgacgagcccgccagggcagccgccgccaggtgtgcggtcgcccacgcgaggaggccagggcaacggcgactctcaccgataccagcgcgacgacaggagtcaggccgatgcttcgcactccaagccagcgtctggaggccagtcaggtgcgttctccaaggttgaaaactttctgtagacgcttgaagctgtggtcgaccagcagggagggggtcgcgaggagaccgcgccgaacggcgcaccagagctcagggctcgacatgggctcgctccttagcgcatcgcgagcatgcttgcttcccgtctttcgctcaaaagaggaggaagctgactccagtgttggtctctttttcctccagctccagctgtgcgtccgccacgagtctcgcatggacctcaggataagccctctccaggtgcgtcattgcgttaagctgcacgccgtcacgagctgcaccggctgatgcgacgaaaaacgacgcaatgtatcatagatctgagctcgggagcttattcggcgcctctgaagcgggaggactttccctcgaccgagccatttgacgagctgtgggccaaactcgaggcctgccgaccagagaagacggtccttacgtggcacggactgactcgtacgtccctgccatttgctcttgcccctcgtcccccttagctgacctttaatttgttccaggtgtcgatgggtcgttggcgctgaacttcctgctcacgccaggctcgcccctcgaagtcgtcggctcagagcgacgaccagggcacaactcgtttcgtcgcctcgtcagccagcgcatgaccaccaattccaaggtcgccgtctcacttgccaagattgctgtggcggcctaccctagtgacccgatcatcctggtcaattgtgcgcgcctgctggccaccccatcactgacgtatacggccgagatgcacgacgcttttcgcaaggtcgagaccgccaccgaatcgctcgatatggcgcgcgaaaagaggattacgaggaagaggacgaaactggaacatatcggcgacatcgaagactgtctccctgcgctgcgacccgaggctggcaacgcctttcaactggtgcgctctttcctcagctctgaaggggagggctcgtctgctgacacaaattctccccgcagtctcagctggctgtcgagaagcttgaggaggtcaggaagaagctccattccaatgctgctgagcgagccgagcgagccaagctagccgtcactcaaagcgaggcaccttacaagaaagtcatccagatggaggactacccgaataacggcgacctccgtcggagtgtcaagcagctgacgccgctcgacccgctgacgtgggaacccgctggcccgtcagtcaacctctgctcgctcggacttttcagggcctctgctgattttgagcgcgcgcgaccgtggcagacaataatcgaacgaaaccgactgctgccaagctgctctggatccccgggcccctccagtacatctcaaatgagcggtgtccatcctatgggagtctccgctctcttgtggaaatttggtcgcccgaccgaactcaactgccggctgtcgtcgagatgtccgagaccgagaccgaccccttcgttctcgccaaggcgatcgcctgggtggcggagaagcccgcagtgaccgagctcgagatctctgcccgccgctcaaccctcgagcgcctccaggttcgagtcaggcagctctcgccgacctgggccgagttggatcagaaaaatcttctggaccacgggcaggcgacgattgtcctcgactgcatcgacggcgttcggcccggcctcagcggacaacctcacttggtccgtcgcgcgctctgtgttctttgctcgctgggagttgacttgctgatcccctctgccttccctcgacggtaataggcacactcggcctgcctaccgtgggaccagcttctgagacgcgtccctgtctccaagcatcgccagcggctgcaccagtactatttgtcaacgcagaaacaggaccaacctctacgcgccatcaacatcctgagcgtcatcaatgcgccgctcatgcacgtcccccacgacccggcgtgtgccatctttatcttggccgcctatcgagcggcgcgcaacgacgtccggcatcactctgtcgactttgaccagctgtcggacgatcttctcgcgccctttcgagacgacatttctttggcaacgagcgctgtcgccatccctcgcaaacactcgcaagtgcgcgagtgtgcccgagagctcgtgaacggcgagcttgcgccggtacttggtggcacgggtgaggggtttcgcgccttcttggaccgctttcagcccgaccattcgcaacctgcgatcgtcctcaagtcgggaacgacggcatcggttcgtctgctccattctttatgcagcactgctttgaatctgacggctattctcctccacctctgcagtgaccgccgctggcctcgcttcgaccgattcctgctgcgtctgccgcccttctcgtcctagcccaccgcctgtgcggcgggctgcctcgggcagagactcacgccatctgtctccatgcgaatgagcgtccttgatcctgcgagcgcgctctctcaagttgggtggctcggtccgtcgtacggatgccggccggcgcgaccgctgcctggcgccgctgagagcgttgttgccgtcgcctgctcgactcccacccgcccttctcctgcctttgtcttcacagctctccacccatctcttttcgatgaacgtccttgctagcctaaaggctggagttccccgagctcgatcggcttgcctgcggcgatcgctggcgagctcgccgtcccgagctctgccccgcctggtgcccggatcgaggaggccagccgcctcccagctggccagagcattgaacgacgagccggtcgccgaggcaagtgcagcagcgggcaagccgacagcaccgccggcctggttcatccccaggccaagtttgacggcgcccgtcgtccggccgtcattcctgccgacgccgccgagaaccgagccccttcccgaggatgaggtgcggccgccgcccaagcagctcccaaaggacctgcacgagctttgggttcaccttcactcgcacccgctgctcaagccgggagcggtccagttcattagcacggcccggccagcgcccaagacgatccccatcctcgcccacccgccgcggaacggccggcggaaccgtggctttgccgacggcggcgagggcatcggcggcctcgagattggcggctggtgggactggcaggtcgtctgtgtcgtcgagggccgcgggccgggcgacgtccggcgaggcgagctcgcgattcgggaatgggttcgtcgagacgctctcgaggtgtgctcgtgcaaggctgacttgagcctgcgccccttctcctccttccactcagctcgcgctcaacccgctccactacaagggcagcgtctcggccgtctcgaccaaggtcgtccggccggtcaagggttcgccgccgccagagtggtcgcagattgatacgggcgccggcgtcgccatcaacgtcatgacgtgggccgccaacgagctctacgatctccccggcatctgggccaaccccctgtagcgattgtctctttctacattcaaaaagcaggggcacgctcattcgcatcgggaaggggtatcaggcggcaatcatgccgctgtcgaggccgagcgcgtgcagaagcaggtcgacgttggcaatcttgcgccgcgcggtctcctcgtcgactgtcgggagagcagcggggatcagctttcggcgcagacaaggggggcggacggctttggcctcggacgtaccccagcgctgcttcgaggcgacgacgccctcgaggaccttctcgcgcagctcgccgacgagcgtctgctgctgctgcatgttggcgtggagggccatcgacgagagcatctgccagacgggcatgtcgagcgcgtcgacaccaccgggcgtcttctgggcgtagagcgagggaccaaacgccggcggtagagtcgacgaggggaagagcgtcggcaggatcggcgccagccgctggaacagaaggtcaaaggcgcgctccctacgggtgagagtgacggatggtcagctccggcgcacacgcgtcgaccaacaaggcggcagggtgcgatttgacgtaccactgggcgaggtcggccgggtcagccggctgatcgggcgtaccctgcttgagaagctctgcccgcgagaggaggaccgtgaacaggacgatgccgggctgaaggacgttggttggagagtagaagacgttagcattcggcagctgggcaaagcgagcaggacgtcaaggacgaacccgcgtgcgcgacatgcgcgggacgtcgcaccggctgacgatgagtcctagcatgccggcgacgatcttgagctcgcaccggtcgaggacgccgaggaaagccgggatgatggctccgaggaagaggtccgtctccttctccttggcctcgtcgtccttggagtggggcgggaccgggtggggcgcgtagcggacaacgtcgacttgcgagaagcacgcgaggaggagcgtaaataccgtgaggacctgagccgacgtcaggtgccggagcaggcgcgggaagagacgcttgcccttggtcggcgtcaggagcgagatgaacgggtgcgggtcgctgcggcgaggtggcagagggggagtcagcagtgcggtctcggccgacgggcggcgtaattgcattcgcacctgatgtcgactggctcgtcgatcgcaagccggtgccagagttgggccgacgtcttcttgtagtcctcctgccactcctcggcgagtgccttctcctcgtcggagccttgctcagcgatcagttggaacggcggcgagtcgcgccggagctgttcgagcttcaagacgaggccgtagagctcctcgaggacgatgagcgtctgccgacgggtcaggggctcgccctgcgtagcatgctattgaggtcgcaaggaaaggcagcttgtcagctggaagggggcgagcagaccgggaggcacgcagatagacgcgccatgtggggcgccttgccgtcgagcttggggaccgccggcgaggatgggttgctgccctgggtcgagagcatcggccggggcgccgtcttgctcgtccggacggtgaccttgccgagaacgccctcgaggtgagcgtccgccggcgcgcgctcgcgctgcttagccgcgtcgacaatccgcttgacctggagcgccatcttgtgcatcgcgccttccttgcggccggcgcccttctggccgggcatgccgacgccgacgcccgagccgtccttgctgagccggatgaccgaggacgagccgttgggcgcgcctagcttcgagcggatgatggcgccgtagacctgcgcgtaaaagtcgtcggcgtaggggtcctgcgtgacaagctgcgagacttggatgcgcgtgatgaagtccttgtcggaccgcgtcatgatgtcgttgtaggtcgcctaaaaaaaaaaagacgaaaaaggtgtcagcagaccggtccacaaaggcggtcagcgttgccttaccattgaggcgatcttgcgcgccttgcgcatgcgcttctcatcggcccgctcctgctccttgatcttgcgctcaagctcctgcttgacctcggcctgctgctcggcgttgagaccgacgagcgcgcccatgagctccgtggacgggttggcggcgaccgtctggccaggcagggccggaaacatctcggcgaggttgaacgagcttgcctgatgctgctgctgaggcggctgctgtggaacctgctgctgctcgggctgctggggctgcggctgctgaggctgctggggagggagctgctgctgctgcatttgctggtgctcgatcggccgctgctgctgctgctgctgtgtcatctgctgctgcatctgctgaagctgctggggcgggatctgcgcctgctgctggagaagctggagttgttggtgcatctgctgcggcgtctggtgctggacttgttgcaggtgcggcggcagctggtgcatctgctggccaggaaggggcgggaagccgccgcccatcggcaggccgtgcggatgggggtagccctgcggcgcaaggttgggcgggaagggcgaagggtgaccgcccattggcagagcctgctgttgctgctcgtgcgggaacggttggtgctgcatgtgctgggggtactgctgctgctgctgctgctgctgggggaagcctggcggagggcccggtcggccgcctccgccgcccatgagcatctcggcctcgatctcctccatcgtccgcggtctgggccgggcggcagaggcgagcatctcggcctcgatgtcttcgagcgtcttgcctcgcttctgctgctgctgcgaggcagccgatgtgcccgggatgggctgatcgaagggcgagtacgggtttcgagcgggcgagctcaccggcggcgtgtctgcggggtgaagagaaccgggccttcagcatcgtcaatctgcttttgctcggctggcagggtcgactcacactgatgcgaggacgactgcttcttccagaggtcctcggccgagggccgcgaggaggtgtcttgctgggagcggccttgcgacgtctgcgagggagcggccgtcttgccggccttaggcgccgccggctgccgctcgtcgagcttggccgtgttgccgaagaagtcaaagtcgcggcctattcgagcaggatagagatgatcagcgatggactgatgggctcgcacggctagagggcatggctgcgactgaccgactttgggctggccctcaaaggcgccaaaggtgtcgtcgttgaggtcgtcgccggcctcgttgagctggtcacccaggccgtcatagtcgtcctcgccccagctgatgaggacgacagtctcagatcagcgtcatctctcaaggatacatcgagaagcgggacaagggacggacgtgtagacggcgagatcctcctcctcggcgccgcccctgccgccaaaggtgtcgtcttcgagtgggtcgtcggctcggtccctcctctcggggaggactggcgatcaggctcgtcagcgagagagaagcagagcgaccagccggcagagagagagacacacctgcgtcgaatccaaagaagctcattcctcttttcttactttgctgagggcgaagctggtcgtcgagggacgatcggagaggtcgagcttgcccgtctcagctcgcgcggcggcggcggcgaggcgaaagagctcggcgggcggggccttgctgtgcccctctgaccgcatctcgccttccatgccgcctcggcagtagcactctgacctagcaccctgtgcgatcagaacaatctcgtacactctctgctggccatgccgctgtttagttgccctgggctgaagctgacggggccgtcatctctccgccgcccgcctgcagcgcctaccccctctctccccgccctcgccgccgttcctagcccccttctccgcgacccgccatgtcagtccggctcgcttgtggctccgccaacggctcgttgctgacatagtgcctgacccgaccgcacctttgacgccctaggacagccagacttccgctcgagatccaactcgagatcctccaagcggctgcgcgcgacctcgaccgcacaggccaggccaccgacctcgagaacgcccgtcgggcgaacttcgttgccttctgcctcgtctcgcggagctgggcggtaagtctgactgcttctcttctgtaaaatggtcgttgaatgagagctgacgagttgccctctcttcaacaggccgaggcccgccggctgctctaccggcgcgtcgtcctagtccctatgagccgagcaatcaagttctacgcgacgctcaaggccaacccgaccctcggcgcgctcgtacgcaacgtctaccaccacaatcaccagagctgccagctgttcgcccagaacgtccatctcctgccgggcttgcgcgagctcgagggtccctgggttttcagggacctgccctcgctctcctcgagccctggcacggagatccgacccaaactccagaacctcatcatcgagaactctacatccacttacttaagtcgggatccgcacacgctcgcgccctgggtcgacctcggctcgctcagacgcctggaagttctttggccgtttcagaacctttactcagccgacggccatcacttgaagacgctgctccagtctcctctgattgaggagctagcgttcaagcgcttcgccaccctcacgtcaactttcaagcgcctgctcacgcagaaactcgttcggcttcgggctctgagtatcacgaccgaatccttcagtaccagctggccgacaattggctggccgacagagtacccggtcctccagagcctgacgctcagtgggaatctggtccacccggtcttttctcaggccatcttcaggtcactcgagatcgtgcgactgattggatggaaacggattcccggggtcactccgcagccgccgaccgtttcttactacgtcaacattctctgcgacgccgtcgccgagaggcccgaacgctaccctgtcctgcggaaggtttctttcccacaccacccatccggctctgacgcggccgccaatctcaagctcatcgccgacgagctcgccacggtcggcctctcactcgtcgacgacgacggcaacccgatcactttttcttgatcagccctcttctcggctgccctctctagcttgcgacacacgatgctgtctttccttacgtcgcctgctctggactgatcgtcgggggtgcgagcgtctcgggttttaaggacggtcggatgggcgtcagtcacgccgtctgcatctcgcctccgctgtccctcgcgaccctgcggctcattgagctgaagcgaaaagacttcgtgcaggtcgacagcctttgcaatgagcgggtgaggcttcggtgtttccttcatgaagatcggctctcaaatcgaccgagaaagctctacagctcctgactgagcttactccccggcagcggctccaccctccctccctcgcctactgccgcgctcgccctcggcaagctcttctcgtcgtcgacggcgaaaaagtcgcaggtcgcaaaggccgcgtagggcggccggtcgagcgagttgagcgcaacttgcttgtcggtgttgatgtcggctatcagggcctctgaagtatgaaggaaggtgagagcgagggcgggtcagtctcaaccggtcaggaggcaggcgggacggtcaacagggacgaggacagcaagtatgtcctcgacaggcagacaaagtggtgtaccctatcctccccgctcttcctgtctcgacgagggaagaggcgccggcctgcgctcggtggcagaagatctgcagcgcgttcgccggtccgcagcctacatcgcgttggcgagccgcagaccaaccacagctctgacctcgagcgaagccgcccaatttgtctcgcccagtcaaccgagtgaccgaccaccagccgcgctggtcaaaaaggcttcggcctcctccaaccgctcaagccagccactcccctcttgtaaacgagccgatccactctgctgtggacgcaccttttgagacgtagtcgagctccgggcggatatagcccaggacgacgacctggatctcgtgcgagtagaagtcggacgagtactggcgggcacgaaggggggccgggcgagagcggacgtcagccagaggcggggcggagtattgagaggtactagaggggacgcacctcgtgcataacgtggacctcctgtgaagcgcagagtatgggggaaaggcacaccgcagaagggagaagcgtgggagcaggcagagatcgcaaggtggcaggatcagcttgaagctcgtcctcgattgggccagacgcatgacggcgctctctccgaaaggaaaggaggccgagctcgctcgcacgcaccgccgtcagccgctcattcttgtagtacgggttccagccgacgctcatcaccatcggccagacgcgcgtgtcctcctcctcgagcgcggtcgccggcgtcgcgtgcccggggagagcggctgagatgccgtgctggggtgtcgggtggacgcgagcgaagccataatagacgccgcggagcgagatcgaggtgagcgggaggattgaggcgtctgggaggttggctggcgggcaggcaagtcaagggaaggagagggtgaggtcagctcttttgtggccgtcgcacgaggccgatggcgcgagcttcctcgccggctcttgcgtcccgagctcgccaggcggtgcgacagagcaggggagccgcccggagaggagcagctcgcccgagcgtgtgcgagcacgagagacgaagcgcaccggttgggatcccgagctccttgctgcctcggccaaagcccttctggacggcgcccctgaggaagagtgggtagggcgtctcgggcgtcgcgggtccgacgatcgccggccggtccgagcgcgagacgggcgcggtctctgccggctgaggtggaggaggcgaagggaggccagacatgacttgctgagaggggaaaggtggtgggcggtggatgtgggctgaagggagggagggagagcagcagccagggcgattgacaggcgcttcggccgccgcgcgcgccggacgacggagaccccatactctgtcagcccgaggccgaggcgagggaacgactgctgagcaaggcagtcgaccaaggagtgagagttgagaatacattgcaaaagtctaggagcgagcactatcgatacaggaaaggcggagcgagacaaaaggtgaggggagggaggagggcatggagggcgtacaggtcggccggcgacagcgtcctcagtcgaaggtcgcctcggtagacgactctggagtgggcacaggacgctcccaccaaccgggctcgggccactgctcgcgcaggaaagatctggaggaaagccctcgagaggtcagtccctgcgcaagagcgacgagcgcgcaagaagcgaaggcacaacgcacttgatcgccgccaccgaccgctcctcgtcttcctcgctgccctcgatgtcgtcgttgatcgcgagcgagctgactttagagtctgatgcgttgatcttgcgggccgagtcgatgtcgtccgggtgcacgaccatggtgaactggtagtcggactcgcctggaggccgaattaggttgaggaagaggggaggggtcagcgtcgatgagcgagagcgtgcgccaaggcgcaacaggcgggaaagaaggacggaccggatgcgaactgatagcgcgcaatcagcctcaagcaccacgcccgcaggtcgacctcgggctcgtgcgaccgtaccaccgaccggaggttgaagtcggtcgcacgccaggtcttcgtcaacggcatgtgcggctggaggtcgaccgacaggcggtcgagggggtcgatggcgagcaagaggttgggcggaggaaggacggccgagagaccggtgcgtgcggaacggttgatgagcgccttgaggactagcaagggacgcacgcaagggaagtcagtagggggaaggcagcgtgagcgtgagtatggcgattgaggacctactctgatcgccacacgcgtaatgctcgaacgcgacgcgctcaaacatctcgacggccgagctgtcggactcttttgtccagaacgggccgaagcagacgtcgagccgggccgtgtcaggcccaggagcctggcggtggttgtgagggaggccgccgtcgtagctcgctgataggtgaccagtgtagagttagtcagcttgctcttgtttcggcaagccctctcgggcgaagtaagacgggcgacgtaccccacagatactgcgtcgtcatcggtcctccgaggcccatcgcccggaagctcgctgagagcgtctcccagacgagcgtgtcccgcaccgttcggctgaaggcgcaaatcgggccgtctcgaacgtagttgctgccgctgccggatgaggccgcggtcaagggagaggtgacgttgaagaggtcggcaatctcggcacgagcggaggctgaccaggtaccgtcgagccctccgagacgagccacgctgcagggcaaagagaaaggcgttagccaggcgacgcagccaggaaagcaaacgcgtgaaaacgcacgcccaggtccagagcattgactcgcgcgacctctcgaccatcagctcatttgccatccacgtcgcgtgcaagtcgcccactcggctctcctcgctcggcccgcgctcgacttcgcggaagcggcgttttgacgagtgggcaaagtcggccgcccagatctgggccgactcggcaagggcggcgcgcgagaagactttggggatgtgctggaggcccatgcgtttgcggtggccaaagcggtggccttgaaatcgcgagaataagcgaggtcagcctcaggcaaaagatggaggtggcgaggagcacgcaccaaacacccagttggaccggagcatggcgctccactcgtggacgcaggccgttgcggggaactcgtcggccgtcacccatgccgggaagatgaacccaaggaccgggccaaaaagcggcgtgtagtagtcggccttggagtgctgaggagagcacgtagtcaaccaggaagggtcgtcagactaagcgagcacgccaaggggaggacgtcgagccgagcgttcgcaccttgcgcgtcaggaagaagtcgtcgttgaagtagacaaagtgcggggcgaggccagggatgttgacgagctggccctcgatcgcaaacctgccgagccaggggaaggtcagcagtgttgggcggggaggaaaagtagggcggaaaatgcacgagttgaagttgggcagggcctcgctcctgtaccggagggcagcctcctcgtcgacggccgtccggtccttgaagatctcggcgtggtgatggaccttgacgctcaagcctgcccgttcgagcccgagcaagctcgcgtcgagccactctggcatctggcctgctcgccactcgcgcccttgctcgagcgcgcggtgggcgctccagtcggcccggaagtactctttgacgacgggcgaggcgtgcgcgccgagcgcccagtcaccgaggacgaggtggaatgtccggacatgccggtcgatgcccatcgacttgaagacagagcggagcgagtgtcggagctcgtcctgtgagatacggtagtgatcagcacctcgaggattcaggtcgaaccaggagcagactgaccttgttgcgatagtgccgaatgggcgggacgccccagccctgtggcagcgaggtcacgtttgggtcggcatagtgcgcaaagtgagcatgccaggctgggtccgagcctgcagttcaaatatcgcacaacaattagcagtcgaacgtcatgggccgcgccgaaagaaagacggaagcgcaccgttcacccaagtccagacgacatcgagctcgcccgccttgtcggccacctcgttcggctcacaggcctgtccccgaccgagccacttctcgaggcagctgtcgggcaggatgtcgaccggctcgacgccggcgccgactgcagcgtagtcgggctgagccgacggctggaagacacggtacgtccggcggaggacgggctcggtcaggttggggagcgaccagctggtcgcgagctcggcgccgggttcgtccgccatcgactgactgagcgcgggctgcggcacggccggcgaccagaaatcgacgccataggtcgtagcgaggacgagcgggtcgaacggcaggaggagcgtcccgcggagatcatagtcgtccgggagcgtcaggtgaagcgtcaggtagatggacgagaggagcgtgccgccaaggatggccgctcggacgagccgcgccttgagctcccggcggacggccggccgtcgcgcggtccctatcggcaaggcctcgtactggccacccgggtcgagcggcgtgagcgacggccgctggggcgatcggagcggcaggtagccagagaccaccatcggagggtctgctccggcgtcgagggagaagggcggagacgaatgggcaggaggctgccggtccagtcgtcgggagccgagagagtcgagagctgtcgagcgccacaaggaggcggcggcggaggtttggctgagcaagcgaacaagcgagctggctggcggctggcgggcgagtcgtaaggccggcgcggatgggcgaagacggaacgcaggctgccgtctcgatctagatcgagcagagagagagagaagagagggtggccgtcgaggcggcaagagctgcgaccctctcctctccgagagcggtttgagctcctttgggtcgtgtgccagattccgcgcgcagcgcgcagcagcagcctccgcagttgatcgatcgtgccgcctgcagttgccgcctgctgcctccctctcgcgtagcacccagctctgctctgctctcctcttctcaagctgctgctgcgtgctcgagctcgcttccaggcccttcttcaggctgccttctgccgtctctggagggaagcagatgcgaggtctaaagaggggggggaggggtcgtcaggcttctgtttcgagcgcgcgagccaagccagcgcagacccacggctgcggggccgcaaggccagcggtgtccacggcttccggcggccgacgacgacgacgcctcgctcctatcacgtactcgacagcggcttgctcgtcgttgaggcgctggccatccgacgccattcgtagaggtgggaggagggtaggacgtaccgttgctcagcgccgggggagggccgggcgacggaggatgcctacgagcgattcgagccggcgcgacgactgccagctatcaaggagtatcggctcgtctcgacagcggccgaagagccctccactctctccaaggcactggacgacgaggacgggtcgggtcgggtcgaagctcgtcttgcgttcggcttcggaacgtgaccgactgcacgagccttacaccgcggcgcgtaacggtgttccgcaagggcaggagctcgcctcgggcggccgaacgtatagagaagggcgtgcgggcgaagcacgtccaactgggagcatgtcctgtttgcgatagatgtcgtagagaagagacggccggacgggagcgagctgaagcaggcgggagcgagctggagcaggcggcggcgtcgctcgctcgagctcgcctttactgagccgccttgcgatggtcctctttcgtcgcgtcaggcttgttcctcgacgacgacgacgatcacgatcaccagcaaggttatcgggccgccatgaactcttacgtgcgaccgtcgtcctgcccatcccaaggagcgcatggtactgacagtcgccctgccctccagccggtccactttctctcgcagccccggccgctgctcttcgtcgccgggctcgaccggacccctacagctcccggctcgacctcctcctcctcggcccagccgccgtcctctaacgaaagcgctctggcagcatcgcctgcaccgagcgccgacgatgcggcctttgcgagcctctcgcaccgcctgcgcgagctctttgagcggcagggcgggctgaacgtctgggagcgcgagccgggcccttcatcgaccgaaccggtcgccggccaggatggaggagctggcccggccgtctcggcgactgctcagggcaagcggcgcgagcgcaaagagttccgcatcttgctcgtcgacaaggtgcgtgtctgctaggagagccttgccaaggaggacgacggcctgacgcctgcgattaacccttgcccgcacgacaggatgtccgcctacctcccccgaaggtcgctgcagcctctgctggcgcctcgaccagctcgattcctggcatggctggctcgacatcgtcgagctcgctcgcctcgacggcctcgtcccactcccactcgcactcgcattcgaccggccttgcgcgttcgccgctctcgccccacacgccgacatcgccgctctacccggacgggctgatcgcgcctgtctggctgcgcaagcacgccgatctcctgccgtccaactttgtcctcttccaccggctcgcgccctcgagctcacccctcgccggcgcaaacgaggacgacgcgctgatcgccgagctcagccggcgtcggcgcgtgctttcggagcgcggcatcaagctgacggtcgtcctgctggcctcgcgcgacctcctcgactcgcccgcgctcgacggccggctttcgcacctccgccggtcggcgacactcgacgccaggtcgtcgctctttgtcctgacgcccgtctcggccgaagagctcgccgagttctcggccagcctccaggacgtcctctgggagagcgcactcgagttctacgcgcagaaagagcgccaggccagtcggcgcaagaagactcgagcaagcgaggtccgcaccggcggccgggcactgaacgccgagggctggcgcgtccgcgacgagttcaagagcggcttctgggccgagatccggggcgactgggagacggcccgcaagcactaccacctgtcatatcaggcgcttctctctctctttgcctcgggccacctccatgcgcggacgaaacgatgggccgaggcaaaagtcctgtcggacgcgctcgtcctccggctctcgcgcctctcgctctatctccgccaggccggccagagcgcagccctcgtccgggcccacgtcgttgcttttgctcggctcggcgagggatggggcatgcgacccggtggctgggaatgggcctcgtgggagggccgccagtggcgactcttggccgagctcatggagcaagccgggcccgacatcacgccgttgttgggcgtcccacccgctgcgacagttgctggcagcgcactcggcgtccgagtccccagtgaggtcctctggggccgcgagtggtatctctacgaagccggccggtgcgccgagcgacgagaggtagctttccgggacgagctcgaggccgagcgggccgccagtgggtcctcacgggacggcgccggcgaagagcgtgccggttgggccaacgagaaaaaggtcgaccacttacagcttatcgtcgaggtgcgcccgagtcttctgccctgccctttgctacacctgtcctgacgcctaagccttcggccgccatagctctacaccaaggcgtacaccttgctatcagcctcaccaaagcctcatgctcgactcgccctgcacgtcgcccatcgactcgcggtcgcctactcgcgcgcgggcaaggacgatcttagccggcgcttttgggaacgcctcggtcggggctacgagcgcgagggctggggcgtcagcgtcggcggcctgctcggcgacgaggctcggcgcgagcggggacttggcggcgacgattcgttcgagagcctttgggagggcgtcggggacggtcgtcagtgctcatcttgtcttcccggccggtctgcgcggcgcgaggctgacctcgtgctcgcttcacaggcgttacccaggacgagctgctcacctttctcagagagaaggaaccaccgtcggccgagccggtcgtcatggccgccactccgatgatgcccgtcttcgaagcctcggcagtcttttatctctcgcagacgtacgccgcggcggccgtgcccttccagctgcacgttagcctgccagagcggcttgcactcgatcagctgcactttgactcgctgcgagtcatgctgtcgaacggctctgacgtcgtcgtccggcacaagtcagacgtgcaggaggtggccaacgcgataggcgtccggctcgtcaagattgccgagggcaaggagggtgtggcagacctgacgtggaccgaggacgctcggacgctggttgtctctggctggacgaagcccagctcgccgggcccgatatcggtcagtccgttggtacctttttctttgcgcagtcactcaccgccttcatcgtcgctcgctctcagatcactgaggccgtcctgcttctcaaggttgagggctggacggttgagctgcattttgacccgaatccgtcgccggcccgacccctgcggcatgccccgcgctggctcagctcccttcaccccttgactttcgtcggcctgcatcgtgccgagccccatctctcccagtgcgtctcgagctgtcctctacacaggtcgcccggtagccgatactgacgcgtcgtggccactcagggtgattgcccagccccacctgctcgacgtcgagatctcgcacccgagcccagcctacctcgaggaggctcatccggtcactatctcggtcatcagtcgcgacacgcgggcgctcgacgtctggttcgacgccctcatctatccatccgaggatcacgaaagtgcgcctccctccttctcgcccagatcgatcgcttgtccaagcgggactgacactacccaccgccgctcttagtcaatttcatcacgctcgacaagcagtcgtcgacctcgctcatcaccaaagtctatcttggagcgctcgccgccggcggctcgatcgagcgcacgctctaccttcgcgccaacggcacgtctggcgaccggacgctcgacttctccgttcaaacgcgcctcgcatcaagttctgcggccgagcatagccgctcggccagcgaggcgtcttcggcaaccgacggtatcaagccagaggagcagatgcggacgctcgtcatcccttgcatccgtccacttgccgtctcgttcgacctgaagcgttatccgccgctcggcccaaagcgtggcctgctcgagctagcggaggacgaggacgacggcttcgagccgacagaagaggttctcgtctcggcgcgcttcgagatgcgcggtccgctgccgatcgtcgtcgagtcgatgaccttcgtgccagaggtgagtcgcccctcttcttgaattgcttgcgcggaaggtcaggaactgaccctctcgcctgccctgccagaccgtcgcgaacgcccggcagaccttttcgtcgctggcggccaagacaaaagccgaccagcccactcgtgcgtgcgctttgcctcgcctcgctggacttcatccccttggaatggaccgctgatcccgctgccttcgccctgcgcaggctgggagaacgggcactcgttctcggccatctgcggctttgcggtcgacgcaacagctgacggtccaggccaagacgacgacaacctgccgcttgccgcgctgcgttatgcctcacctggcttctacgacgttgcctggcgaaggtcagtctcgacattcccagcccgttgtcttcctcgaacgccgccgactgaccgagctggtcacaggcacacgctggacggctccgcgtccgaggtgtcgcactcgaggttcgcggtgccatcgcttctcgccgtcgcacttgcggtcggcagggcaccggaacacctgacaggcctcctttcgaccgagagcacgcacctgaccctcatggaaccttttagccttcgcctcacggtcaataacacgtcggccgactttcgctcctccaccgttcagatccaggtcgactcgtccgacgcctttgcttgggccggtccgcgctcggctcggctgccgctccttctcgctggccagagcaagattgtccacctgagggcggccgccctccgggtcggcttggtccggcttccgcggatccggctctgggaggtgctcgcggtcgagggcggcgaaggcggcggcgttgagacgcagatgcgtgagattgccgtccggctagagggcgctgtcgggccagagtcgtcagaacaggcaacagccggcctgcaggtctttgtcgccccgccctgagcgcacgtgctgtcctttaatgacccgtcaacgacccaatgacatgagacgcgagagacaacgttcgaaggacgagaagagattggtgcccggggccactgtccatcgccatagatgatgacccgcaccctcagaccccccaggggccgaccgcgccgacgggcgtttgcgaagcctccggactgtcgtcgccttcgtcgaggttgacgacggccccgctctgggctgcgacgacgtcaagcgcgaccttgagccagtcggccgcggcctgctcgcgcgactgtgttgggcgggccgcgaggtgcatcgcaaagaggccagcgagggccgaccggagcgggtcctgcgccgtggcagaaagatcaaaggacgagccgtcggcgacgatgcgcgatccgttacgctgaggcgccgcaaagtcgggcagggtgagcttgatcggattcgagtcggcatgcaggccaaagccggccgacgaggctgcacttctggccgaggatgcaggcggaggaggagcgaggaccgtcgtgccgagaggcaggcgcgaggcaggcgcttctggcggcgtcgacggcgtcatgttggccggcgtcaggcctttgaagtcgggctcggggaagactggcatggctgccgcccactgtttgcggtcgtaccggcgaggatggtcctcgccatcttccgagcctggtgtcgggaaagggtagcgctcggaagcgctcgaacccgcgctcagcatgctcgaggaccgccgccggtctggcgagcctggcgcctgctgctgcggcggctgctgctgctcgtgcagggtgatggtccccgatcggttgcgcggatcgttgatgaagtgctctggcgtgacgatgggcgtccagccgacgggcgtctcgcccccggttccccaggcctccttctgccagccatcgcgcccgctcgactggcggccatccgcggcgcccacactcgaccggacgcttgccgccccgctgtccagcaggcctcccgttccgatccgaggcgagacgccgttcgagggcggtccgacgtggtcgtcgacggcaccatactgcgcccaatagtcgtcggcgatcgaggcgctcgagtcgactcggccgagggatggcccgctgtcggcctcggccgctggtgggtccgaatcgtagccgccccagaaatcgtcggtccggtcgtcctcgcccttggcctcatcgagctcgtgctcgtgtgcgagccgatcggccgcctcccggccggtctggagagcctgctcgagcgacgaccagcggacggtcgagggcgagtcgctcgctagccggaggccctcgagccgccaagatcgatcgggaccttcgtacgtgaagacgagctcgagggtcacctcacttaagtcgagcgttgcaaacagcaggacgcgggcttgaagggtaagtgggtctggaaaggcgtacgttggctcgagaggcgggtgctacgaacgaggaggccgggggggtcagctgcgcccagtgccgaggttgctcgtccgggaccaacctcgctctcgcccatcaggcgaccgatctcgtgaacggcgtctgcgacccgctgcttgacctcggcgctgacgtttgagctcggcagaaagtgggcgaccgggtcgtcgagcggcggcgggaggtaggtgtgcagctgcgtgagcgcgagcgagaggatctcgggtggcagcggcgggttgggtgccgggacgagatacgagagcacgacggccggcaagctggcaggcagagggacaggagcaggtccggcagacatcaggggctagggagagaggctgggtggtggtggtggtgccctggggccggaggaggtgggagggagatgaaggtgcagaggcgaaggcgacgagcgcgcgcaggcgagcccggccacgcccgaggactctgccccgagtcctgccgagggtcggcccggaggctggcgtctttgccatgatcagtgcatcgaaggctcgcatgggcatcgctgatagaggaagaagtacaagtgggagacgagaggcgctacaatgggaagggcgagtgtgggaggaacgacggccgcgcagacgagaagacgccgtggctcactcagagcttggccttggccgggccctccttgagcgtgacggcagcagcagcgaggcacggtgcgtcgcgctccttgaccttgcaggctgtggaagaagacgcacagagtggtcagcgctcttgcacagatgacaggaggcgttgatcaagccgcgacgtactgaagatgaccttgccgccctccttccacatctcggtcacgagcgtctcgcccgggtagacgacgccggcaaagcggaccttaatgtcctcgaacgggccaaacgactggaggacgtgcttggcggcgatacccatgaagcagagcccgtggaggactgcgcaggaggaggaggtcagcgggccgggttgctcgcgagagattaagaagggaaggaacgcactcggccgctcgaagccgcccatcttggcaaagtcggggtcgaggtggagcgggttgaggtcgcccgatagcctgcatgaaagaggaggacgacgttcagcgtcggtcggcccgtaaaatccgtccttgtgactcaccggtaaagggccgcctggcgcccgagcgtctgctcctcgacaaccttgtcggccttgcgcgccggcggcttgttggccgcgctcgctgggccgcggtcggcgcccttcttcttgccgccaaagccgccgctgccccggaggacgacggtcgactggttctcaaacagctttcggccggtcgccttgtcgatgccctcggtcgccatcgtcaccgaggctgccttgcccttgtcgagcacctcgagcacccgcgcctgattggtgatcgtgcctgaggtcggaatgtcgccaaagatcttgaggtactgctcgccgtgcagcagcttggcctagaggccactcggagggtgcaggccggtcagcgtctccagtgacgagcaaggtcggcgctccctcgcccaggacgcaccgggttgaagtttgggatccagtcaaagctgagcccgccgccggccgcaaagcccgggatgacgccaaacgtcggcagggcgccaaagtggtcgtggccctcgtacgtccactggaggtcgcgctcggtcgcgccgacgccgaggttgtagaggatgacgtccttctgggcgtacgtgtagtcctcggccggcggcacgttgcgcttggcctcgcggacgagctccgggtcctccgggtcgtcgctggcgctgctgctgctgctgccggccgccgccgccttgttgtcaaagttctcgactacctgctgcatcgcctcttgcgtcgtcgtcgggtgcgtcgtccggccgtcgtctggtgggagcagcgcagggtcgtcagcctgcagctctcgagttgagagcgcctcgtgcgagaatcgacttgccgaaggcggtgatcttgggccacttctggacgagctcgtcggctgtgtagaagcggttgttcgggaagccaaactggagagacgaggccgcatcgtcagtgcctgcgagccttgttctgcaagacactgttgcgactcacgccgccagagcgctcccagcggaccttggcggcccagccgcccgagacctcaaagagctcgccggtcgtgtcgcagtcggtcgaggcgaggtagccgacgagcggcgcgacatactctggcttgaaggcgtcgaccatctcctgcggccagattgtctttgtcatggccgtcccggccgagggggcgatgcagttgacgagaatgttgtacttgcggccctcgagcgcaagcgtccgcgtcaggccaaggatggccgccttggccgtcgagtaatttgcctggccgaagttgccaaagatgccgacacccgagcacgtcgtgacgatccgtccgccgccattctgctgcatgccctcccagacgccctggattcccttgaacgtcgcccggagatggacggccatgacggcgtcccactcgccgaccgtcatcgcggcgaacgacttgtcgcggaggatgccggcgttggcgatgaagacctcaatcttcttggccttgttccagggcgcggcgagcgcggtcgagacaatcagggaagcgtcctcagccgaggcgacgcaggcaacggccttgccgccggctggtgcatcaagcgagggaaggaagcgtcagtcagcggaagaagagcgacggttaacggggacgagacgacgcacccttgacgacctcgtcgacgacagcctcggcacccttctggctgacgtcgttgacgacgacacccgcaccgagccgggcaaacatgtgggcgtacgcccggccgagaccggcgccggcaccggtgatgacgaccgtctgaccggcaaacgagaccttctctgctgcctgcgggttggacggcagcgaggtagccgacttgaggacagtctgcagaagcggagaggagcgtcagctcgtggatctaatgtcagagcacgcggggggggggggcgccgcaccatcatgtccttgtcggtcatgccctcggggtgctcggcgttggtgaagtcgccaatctcggcaaacttggccttgacggcactcggcgtaaagctgtcgtcggtccggaagacaacgcccatgctgcgctcccagcggacctcggcgacgaatccggcgccgacctcaaagatgcggccgctgatgggactcgagctgccgacggcgtcgcgtgccgtcaggacgccgacgagcggggcgacaaactctggcttgagggcgtcgagcatctcctgcgggaggacggttgcgagcatctgggtcgccgccatcggtgcaatcacgttggccgcgatgccgtactttgcgccttcgcgcgcgagcgtctttgtgaaggcgacgagccccatcttggcggccgagtagttggcctggccgacgttgccgtagaggccagcagccgacgccgtattgacaatctttccgtactgcagaaagcaagtgaggcaagggggtcagccggctgcttgcaagctcggtcggggcggcgcagtttgaggcagcataccttctgcgagcgcatcggcccccaaacggccttagtcatgagaaacgccccgcggagatgaacggcctggacgagatcccagtcggcctctgacatcttcttgaagctcttgtcgcggatgatgcccgcgttgttgatcagcacgtggacggccggcccaaaggcggcttggctgtcgcggacgaccgcctcggcgtcgtccgtcaccgagtggaccgaggcaatcgcctggccgccggctatgggtccagccgaggaggatgcgacgggggatcgtcattgtcagcttgaggttccgaggcagaaacaagaggagagggcgagctcgggccaggaggcgcgacacgcacccttgacgatctcgtcgacgacggcctgggccggctttgcgccgacatcgttgacgacgaccttggcaccgagcttggcatagtagagcgagtatctgaaacgacagtctcaagcgtcagtctctctctctcttgtgagccgacgagacgcagaagtagaatgaggggagggggactgacacccgaccgatgccggcaccggcgccggtgatgatgacgacctggtccttgaacgagacgggcgacatcggagtgagagagagagagagaaaggaagcgaagcaggaggcgtgtgaatgtagtcgaggtggggtatgggatgcgaagggttgagaggatggtcgttggtaggcagggagagagagagacggcttgccgggctcgttgccggggctgaggcacgaggctctccgggacagacgattgccggcgccgccggggatttcaattgaaccccgcttgaccagaatcggggctgtttctgcactctcgctctggcaatccattcacgttcagtcactcgagccaggcgcacaagacagggcgagagaaggggcgagagagaacagattcgaggaagcaagacgaaacagcgagaacgaccttgtttgcggcagcgatcaccggatgtcgacggacgagcgagagcgcgacggcgagggcgagggtactaaagagggagggtagccaaatcgctcccttcagcactgacgagtctagagagtcgcatctgctacaggtccccgctccgctcgaccttttttgagcctgtcgtcgccgtcggccgccctcgctttcgtgcgccagccccagcttcccctcgcggcgactgcgacgtcgccgacacgtccggcacgaggccgagatactctgccgcccaaaccttcatgatgaggtcccagcgcttgcacgacgggacgtggagggccgaggcgtcgtcctgcgagggcatcgagcgagacaatgctcagcagcggagggggacgctcggacgcgagcgagaagcgactcactcgaatcgtgtgccagacggaaggaaacggcgacgagatgactggtgatcgagggacgagtagcttgggtcagctgggcgagccttcgttcgggatgacgacaagcggcggcgtaccatggaggatctcaacgccccgctggaggaacggcaggtggtcgtcgctgatgccacccccaatccacgtccggcccgtgtcgcgcttcctgaaccagctccggccgagaccagtcttcgtgtctgtcgcccagctggcctcgccgagcgtcgcaaaccggccggcggcgccgagtcggcgctcaatgtcgcgcagctggtcaaacatccagccggtcgtcgggtagaaggacgagatggtcgggtcggccgcgccgagcaggtcgagcaggacgagcgcgtccatctgctcgagcacgttgggcgagcgcgagaagcggtggcgcgtgtcaaagtggtacgactcggccgcggggggctcggggtacgtctcggacctgcagcaagtcggccgaaaatgaacgggcggcagtggtgagtaaggcgggcgggcaacaggcagactgctagacgccggacggaccacttttgggcgagatgccgcgcgccgtacgtcgagtcggtgtcggtccactgcttgaaggcctcctcgccatcaaagaagacgatctggatcgtcgtgtcgcccgcgtcctgctcgtcaaagccatcggacgcgagctcgacccagccgtcgccgttggctgcggcttggagccgctgacgccgcgcctcgagcagcggcgtcagcgtcgtcgctagcgagcagagcatcgtgatcgggaaggccgagtcggtcgcgccgacaaactatccgtgtgatagtaacgcgtcagcgagctgctttcccagtgaacgccgtaggtgagcggacctcgttttcgggcgccgtcggaaagaacttggaatcgaagtgggcggcaaggacgatccgccggggtgcgtccttgtcaaaagtaaagacgaggttggtgaattcgcggtcgccgtacggcgtcgagtcggtgaagcgatcctgcaagaagaatggcgtgggttagcacctccatcgttccggaagcagagaaggtgagtagcgcaccgtctcgacgtcccaggcaaggtcggtgaagacgtttgtcaggtacttctggacaaagagactggcgtggagacgggcattagctgtcaaggagcagaccaaggctgggtacccgactcacttgccatccgtgccggctggagaagtcgcaacgcaggaggcacgagcggaacagagcagcgtcagcagcaaccgggcgagctgcgcatcgcagcacgcctcctgctagcgctcgacaacccatggaacgcaccgactcgcgggatcaggatcgacttgagcgcgccgccctcaatgctcgggtcgaggaagccctcggccgaccggtcgagcgtcgtcaaggcatcgagggcggacgagctgagctcgcggaacgcgcgccggggccgtgacgagacctcgtcgggcgagacggccgaccgggcggcgacgagcagcagcgggctgagcagccagtagcagagggcaagacgcattggcagcgtggctcgaaggcttcgagaagcaagctgaggcgagaacggcgagatggcgggtccgagctgaagcgaagccaagggaggctggccggccgggcgtccggcgtgcccccgtttgggctacgtgctgaggttattgggctcccggcgaaatcgaggacgcgcggccgacgcgccgggccgacgcgttcggaatgaggtcgcctcgtcgatgacaggtcggccccttcctcccctcacaccctcctcttctcgcattctcaggaccctctcacgcatcaagagcaagctcgtttgaacctggtagacaacgcgcacgatcctaggcccaactcgcctcaagacttgcctctggccgctgccgctccggccgtctcccctccggtctgccctcgcgcgcttgacatgtcgtcgtctccctccgcctcgtcgtccagggctggcatcgcagggtcaaagccgatcacgagcgctctgcctgatcgcttccagccgagagcggcttccgacgaatcggacgcttccgacgcgggcgatgtccctgtcggtgccgacggctcgccaggccgcgcgcgattgacgcgtcgcgcaccagccgctgccgcatcgtcctcgccgaccaaggagccgacggccgaggagcttgacgctatcgtcgctaagctccgagacgaggcgcgagcagaggctgtggctttggacgcacctggcggggctggtccgaccaagcgccggacgtacggccgggcgggcgggctgatccgcaagattgcccatccgaccgctccgaccgacagcgccgcttccaccggcctcccccagtcgctctttgggagctcgagcctcacctcactcgacccgtcatccgaggcggcgtccgctctgcacgccggagggagctcacagaggacagcgaccggctccgaggccgacgaccctgaccgaacgatcgccgccgcccggtcgtcttcggtcagcaggcctcagccattccgaccgggaagctcatcctcccgccggctagtttcgtccgacgacgacaggagcgatgatgccgcagagacctacactttcgccgctcggcgacgacctcggccctcggccgggggccacccgatgcgggtcgtcagctcctcctcggtcgtcgtctcctcgccgccggtgcctatgacccaagcattgccgataaggcagcctgctgagcccgggcccagcaatccgacggccgccagcaaatccctttcaaaccaggcccggccgttccgcccgccaccgccggcccgtgcgtcgctcgggctcggtccggaagactcgaccgtgtcgttcgggaccggccggtcgatgagccccgccattggcgagtttgcgcccgataaggacgcccaagggagtgcgacggccgaggatgacgacgatgatggccgcgctgaggaggcacgtctccgaggcgttcgcatcaccccgccgctatcgtctcagccctcgacgtcagcctcatcgcccgtcaagcgcgcttcctcctcctctcccgtcaaacgtccctctgcctcttcgacgaagtccgctagcttgcgaccggcgccgaagactatcggcggccggcgtgtgctcgtcgagtcggacgacgaggagggcgtcgtcgcggtcgctccggacgagatggccaccctttttggcgaggaggagagtgctggcggcgacgaggcctgggtcggcgacgccgtccgcgccgtcaaggaaaagcggcgaggcgctaatggtagctcgccgccgcctgagcgatcaactggtggagctaaagtaggtctcgcctgcaaagtgcgtcggctctgcgcacgggtcggctgacacgcgatcctcatccagggcctgagcaagaaggagctcgaaacgatgaagctcgagcaggctcgcatgcagcgcggtgcgtcttggctgaagatgcgacgacccgtagacgagtattgatcaccgccctctgacgcattgcagaacgcaagacggtgatcgacaagcccgagcaggagacgcgcgacatgctcaccttcctccgaaggaagcgcgaggcagccgccgcccgtaagacgcaaacgtgcggcctctgacatcgtacgctcgctcgaaacatctggtgctgacgccgagatagaccctcctgcagcaacccactcgacacccagcgcttcttccgcgactcgcccaggccggcgtcctcaagcggcaccggcgtcctcttctctacaccactccctccaggccggccgtcgtttggcaggacctcgacgccagctttgacattcgtagccaccgagggcgagtcggccgccgactcgtctgacccgatcgtctcgtcgaatccaggtctgactcagcagcccgtcgcggccagccgtcggacgagcgaccggcatcagattgtcctcgacggctcgggctctgacggcgaagagacgtttgacgacgtcgacgcgctgttcgccaagaagaagcgggccgaggcccttcgggcggccgaagagcagtccgcgcgtgagcgacgcgaacggctcagggcggtcaaggagcgggcggctgccctcgcgctggctgcctccaaaggcaagccggtcaagctcgccggcgacagcgacagcgatagcgatcttgagatcgcgccggctgctgctgccgcggatgtcaagccggtcgttggtccgagggctgggatgcctgcagccgccgtcaataaggaggtctcggccaagtctgaacgcaactcgctcgtccaccgcaactttgccaagtacggcgtcgtccacaaggcaggccggacctcagtcggcgcagctagttcttccagcagcggtggcaagcgtgctgggctggcgcaagcgaccgagtcgcagatccgtgctgccggccttactttcggccacggctcgtcgacgccggccgggcctggggccagcaagcgcgccggcagcaaggcccaccacgcccggccggtcaccaaggacgacctggcggcgagcctgctcgccaaagctcaggctcagcgccgtaaggagattgccgagaaggacgccaagcacggccgcgcgcccggcaccgacgcccgctggacgcagaaggtggagaccgactacgacggcctgatgcaaggtgcgcaggtgcgcaagagcgactggatcttgatcgccgaggacgctagcggcggcgaagaggaggaagacgacgccgaagacagcgacttcgaccccgccgccgtcgacgccaacgacgctgccgagccggcagcaggttcggacgacggcgagcctgctgaggagtcggccgcagctgagatcgacgagatggaggccgacgatgaggtgacggcggccgccgtcgctggtgcgactcggtcactcgaagccgactcgcagagctcggacaaagaaaactcgctcccggccggcttggcgcctccggacgaggccggcaaggagagccgaccgtcgtcgggcgtccttggggagcggcctctcgttgccggggacgaagacgacgacgacgagagctttccggtcccgcatcggtccaagcgaagacggacggtcctctttgacgaggacgaagacgaggatgggatgtcatcccctcgcccacagacgaccgaccggcagggctcgcccctctcgcgcgctcggtcaacagcgtcaaacggcaagcaggcgtcgttcggcgtcctgctgtcgccctctgcctcgcctcggccgagtcctgcgcgaactgcggttgcctcgacggccagcctcgggccggaagcctcgagcgatgcttttggagccggtggcggccaggatgacgacggctttggcgacagcggcggcttttctcagttcttcgagccgacccaggctggaaccgtggtgaccgagcggacggcagagtcgcagggcccggccggcagcggcatggacctcgatggcgagggtggcttctcgcagttcttcagtcaaacccaggcgcccgttcctccgaaggtgcgctgtcagccctaaccgaggttcttcaggcgacgactgacgcccttacgctctcttctccaggtcgacgcgcccaaagatggcggcctcaagcagctgcgggcacttgcgcacgatgcgccactccgaccgggaatgtcgcagctgccctcgctcgaagtgtcggcatcgcagcaagaggcggtcgccaacgccctcgccagggacgctggcgttctcgaggacgacgacgaggaggacatccacgagccgccgaggagcggcaagaagatgtttatcaatcaggacgggtgcgtcgtcctgcacagcggccgagcggccgacctaatgctgactgcgcccccgctcctcctccagcttctttacccagaacgagccgtcgacgtttgtcatggacgagacgcccaaccggccgacccagctcgaaccgctgacgacaccggcgacgccgagcgtcctccagggcgtgcaggcttcgatggcggcctcgtcgtcgtcaccggtcaaggcgattcgaaagctcgttcgccggcaggaccgcgtccagaacgaagagccggcggcagacgacgatgacgacgacgttgttgccgactcgcagccggccgcctcgcctccccgcctcgcgcccatcttccgcaaggccgagaagaagaaggagcgcgatctggaccggcctcgcaagccgcgggtgatgacggacgagatccgggcgctgatggaagaccaggcggtcgagtcggacgaggacgacggctttggcgtctttggccagacgcgggcgagcgacgacgagggcgatgaggatgaggaccaggacaagccggtcgagggcctcgtcaatgacgaggagatgacggccgatgccgagaatcaggccgacgaggagcgtgcccggctcgcacggtacgtctcggagccgctcgagcatctgctgccatgtcgctgacttttctctcctgcctgcgccagggagctcgccgaggccgaggacgagcgccagatgaagattgcgcaagacgtgacgaccggcgagttccgcaagaagaagaaggacgcgctcagcatggagatggactcggacgaggaggatcaattcgggacgtcaaagcggtccaaggaggagcgccgacggaagcgcaagctcgacaagctcgacgagatggagcggctcggtccgtccccgctggctatttgctgtttgggaccgaccctccctgactgacgccttctgcctcctcgcagaatttgaccccgagacggcgccgttcgccaagatgtacgccgacacgtacaacgacgatgccgaagattacggcaacctgctctcagaggacgatgaggcggccgtccccgggtccgagccaaacgactttgcagagtcgctcggcatcccgaaggccagggtccgttcatccctcctttgcctgcatctctttttggcgactgacccccgtcgacctgctgccctcctcacagcagcaccgccgacgcatcgtcgcctcgcccgagcccctctcgcgcaatgcaagcagcgcgaacctccggctctacgacgacgtgacggacgggaacgatgccgacgagctcgaagacctgaccgagtcgcaggtccaaatccggcgcggcggggcgcaccggccgcaagcccatccgatacagcaggacgacgacgcttattctgtttgttcccttgcgtcttgcgcctagcccccccccctccccggtcttgccctcattctcccccaacttctgcccacgcccggcccctcgccgtcttttccgccagtccaacacgcacgagagcgagctcccgcaccttgactcgtcaaagatggacgccgctctccgcaaggtgcggccggccacttgccgctttgcctccggcccatcgtctgccgcctcgagcagcggaggaggggcttggcgagccgagcttccgagagaggctcgcgagctgactttcattcccgctcgcctcccgactcttacagtacaccgagctcttcaccggtgcgttgccgcccttcgtgctcgttcggggccctttcagctacctcgccttcagccgccgcccagccgaaagactgaccctttcccctcatctgccttccccagtctcggccaacgagatgaagcggatcgtcggcggcatcgtcagcaccttcaccgccggcctcgagaaggacggcaacacagtcccgatgctgccgacctacgtctttggctacccggccgggcacgagacgggcgacttcatcgccgtcgacctcggagggaccaacctccgcgtctgcttcgtcacgctcaagggcgagggcaagtttgaggtcacccagacaaagtaccgcctgacggacgagcagaagcaggaggacggccagaagctgttcgacttctgcgcgcgttgcgtaaagaacttcctccgcgaccagctcgcgatcaacgagggcgacgagtcggacctcgtcctcggcttcaccgtgcgtcgtcccctctagcgccaacactgccgtcaaagcatgcactcaagctgacgagcctgctcccttccttttccagttctcgtacccatgctcgcaggacaagattgaccacggcgagctcatccgctggaccaagggctttggcaaccccaacaccgagggcaaggactgcgcggccatgttccgcgagtcgctcgtgcgcgaaaaggtgccgatcaagctcgtcgccctcgtcaacgacacgacgggctcgctcattgcgtcaaactatgtcgacccgacgaccaagattggcgtcatcctcggcaccggctgcaacgccgcctatatggagacggtcggcaacattcccaagatggcccacctcggcctgccggccgaccaggagatggccatcaactgcgagtggggcgcgttcgactcgtttgagcactcgtacctccgttcgtcctgcgtctcttgacaacttgcttcatgagggtcgtcctgacatccctctcctcctcaccgctcgccagcccggacggcctacgacaagattatcgacgagacgtccaacaagcccggcgagcaggcctttgagaagatgattgctggcctctacctcggcgaggtcttccggctcgtcatctgcgagatgattgacgtcggcgatctcttcctcggccagagcacgtacaagctcgagaagccgttcgcgttcgacacggcctacctctcgctcctcgaggcgtgcgtcgctctggctctctgagaactgaacgtgcagcggagctgacctcttcccctctacttcgcttcgcagcgacccgaccgacgagggcctcatggccgtcggcatcttctcgcacttctttggcctcgagacgacggccgacgagcgccagttcttccgggcgctcgccaagctcgtcggcacgcgcgccgcccggctcgccgcctgtggcatcgctgccatcgtcaccaagaagaactacctcgacgagggctgctcggtcggggccgacggctcgctctacaacaagtacccgggctttgccgaccgcatcaccgagggcctcgtcgacgtctttggcgagaagggccgcaacatcacgagccaccacgccgaggacggctcgggcgtcggcgccgccatcatcgccgccatgaccaagatccgcaaggacaagaactgtcggtcccccgtcccgagctgccgccgcgcgtaatttttcgctgaccccgcctctgccctgtctctcttgccctccagacttcgtcgacctttaaacggaccgcgcacacacacgctcggatcaacccaaggaactcgcaaagaaccgaaaactccctcccattgacacctgtctgcttgcttctcctctctctcgcccccctgcactgccgccttccctttcacacgtatcactgcttgcatactctatctcactctcacatgtctgccgcctctgctgcccgacgacccatttcaggcggacgccgagtctggatgaccgccttcaggtcggctgcctcatgctgggagggcgcccgtctctcccctgttgctgctagagtcagtccgcccctcaagcttccgtcgagcctcagatcgacttctcgagaggctcggagcacggtcaagcccaaatgtgactctgctgacgaagtgcagtggtgacgggatcggccacaggcgctcatgcagaaccgaggatattgcggagtcgcctggcaaagcggacggccatcgagagttgcggggcgggctcgctcggcagccagtcgtcatctgcgatgtctgcagcagcaaggtgtggccgtcggtcaatcgtcctccagcaggcgctgacatatagacgagaaggcgacgcactggcggctgccacctttggtgcagcggctgagtccgctagccgacggttgcgaacgaaacagtcccaaccgaggaaccagccagagagactgccgtaccgggtcgagatcatgcggccgagcgccgtcggcggcacgtcgttcctaaagcgcagaacccgcctgtaaagcccggaagttcggtcggccagtcgcagttgtcaaagcaggcatcagctcgaacgattgtcgagtcccacttatccgacctgctaacggcggctcgacgtaccgaccgggtccataaggatgcgatcgttcaaggtgagctcccggtcgggcctcgagctctggcgactggcctcgatcagcgcagagacggccaggaacgcccgagcgccttcgacagcagggcgaagggcgtcaagtctcgcatgggcaaacgtctgcatcgagggtcggtggagagagaagacgaggtaggtcggacgaggtcagtcagcgacagtttgcctgatggcgggcccgtctccgaacgaggggcgcaggccgacgcacctgccacgaccggtcgacgaggacgagccggcggaggaagcggcacgcccggaccgttcgatccgcgttctcccacgtcggatggtcgagcacggctccaggccggtcccagagtccgcaggtgccggcatcaaggatcgagagcaggacattgtgcggaagctgggagagacggttgcgcttgccggacgagcggcggctgcgcgagcaggaagatgaggcgccattagccagcgggcatcctttcaagtcgacggtggcctgacgctttcattccagagtccaaagaggaagtcgagcatggtgtcgaggtggaaggagaaggaggtgccgcgagtcaatcgcaaggcgggagggagtaaggctggcgaggcgggaccaaccctcgggtcgacggtgccgtcagctcgccgtcgagaggaatggccagggactcgtgccgtcgccgcacattccttcggcccttggattcgacctcatctcggcacgagaaggcttcgttagcgcaataaagggaggtcgtggttggccttctgagaagcagccggtcgtctggcaagctgctcgtccagcggccgggcgccgggcgtcgcgcagcagcagcagccagcagcagcagctcgtccgaccgtcgcctctcactctttcgacaagacgagtcgaccttcttacacgctagactatccgatgatcgcctgctcttgcacgcctgccttgcatatgggtctgacgacagatgaagaggcgacccggctggcctgctgctcagccacttctcgtcccgcgcgcacgaggacgacgactttgccctgctgccgcgcgcgcgagacggtcggccgtcgtgctctcgctcgactcgctcgcctcgaccccaaacctctctatccaggcaaggatggtctagcagagggctgccctttccatcctctcttttcctctccgcgaagctcccgaaccgagccacggcccgggccaacgcgtctttccgagcccagctccggctcgccccgaccgtccgccctttccatcgtcggtcgccgtctcttcgaccgtctcgcccgtgctcgcacgacgctacatgggacctctaagcccgtcgaagccaatgcagcccacctcgccggcgttcgtcccgtcctcggcctcgtttgcaccggccacatccgcggcgcccaatcgtcgggcccacggcagtcggtcggctgccaacggcgccgccaacatcaacggccaaggagcgaccatcagcgccggtccggtcctctacgacccggcgccgccgaacggcccgcggagtggtggtggagggcgtgatctgacgacctcgaaccggcggccgacgacagtcccttcgagcacagctccaggtctgctcggacaggagcagcagccgaccggtcaccgaagccgagccggccagaaccagcgaccgcctcagcagcagcagcagcagcagcagcaggactcgcggcctccaagggagtctcgggccgagctcagagcgaaggaggcggcgaacggcaacgtccaggacatcctccggttcgtcctcgcccagcttacctcgcgtcgttggattactggagctgtcgctttgcgcttattcaggactgaccctctctgatcgtccgctttccgcctgcagggagatcaagggcctccagatgggctttgcgcagagtctcgaaggaagcctgccctgggccggcttggtagaggagcagcggaaagggtacgtctgcccgagtagctgaacgctacgtctgcgccctctaggcgaccttaccggtctgatcgttgctgatacggccgacttgacctgatctcgtgacgcgttgcagcatccgtcgccagtacctgacgctgctctatggctatccgcgcgaggccgacctcaacacgttcgaccagcactggatgcagacgacgcactctgtcatcgccaagtaccgcgctctgccagagatgaagatcgcgctaaatgaccctgccgccgcactcgctgctgccgctgccgcctcaacaaaaagctcgtcgtccaggcgtgccaagggtagcggcggcggtcgcaaggacgatgccgccgcagccgtcagtgacccgcggccggtcctcaaagagtttgcctccttcctcaaggaggagatcaagcagtacaaggagctcgttgtccgactcgccgtctcatccggcctgaccgaggtcgaggattacctgtcgctactccatcccggccccgacctgatccgcgtggcgaccgacgagccgctcgggccgctcgagcgggagcgcaaggtcggcatgtttgtcaagggactcatcttcctcggcgatctcgagcggtaccgcgagatgtactcgcccacccggctcggactagccgatgtcgcgccccggaagcgcgagcgccggtcaaacactgccgcgaaggccgccgagctctctgccgagcagcaggtgtcgctcccacccgacgccgagttcaaggacgcccgccagtattatgatacggcccggctgatccagcccgagaacggtacggcttgtctcttgatagatcgtcctcagctggccaggatcctgaccatctgcctgcatttgctcgcccacctcgcaggcaatcccttcaaccaactcgcgaccatcgacaactaccgcagcgaccgctttggcgcgacctaccactggctccgcgcgctcgccgtcaaagagcccttcaccaccgcccgcggcaacctccaggcgacgctcaagggaccgctcaggacccacctcgagcgcgagcctgccgctggcacgctggcgctggaaagggcgctcgagaaggacatcatcgtcctcctcgctatgctcgtcctccgggccggctttgacgagaccttcgtcgaggcgacgcttgggcgcctgtcggctctgatccgcaactgcgtgctctcgaaagaggtcgtcctccggacattcgtctcgctctgcgcaattcactgggacgcccggcttgtccggccgacaccgcgctcgtcggacgctaggggcaagtccaaggtcgacgccgagctccgcacgctcgagaccatcctcggactcgtcaccgccctcctcgccgcagcagcggatgcgctcatcagctcgctctcgccccggcagcaggcgaccctcgacagcggagctgccgtcctcgatactgccgagacagcggctgccggcgaacggctcgacaacttctcgcgttacctgactgccgtcctccggcagacgttgccgacccttcgtgttgccttcaagtggatccacgcgcaccaagactacctcacgcgtgttgtccagcggcaagaatccggttcggccgtcgccgcccggagccagcttatgtttgccgcctacgtccgctttgctaacgctctggcgtacgtcttctccgcgatcgacccgggtatcctcgagggctcgctcgaagaagacctcgagcttcgcggctttggcccgctccgcaagttgttcccggcaagcatgtctgtcgctccggcccagcaggccgacggccactcgaacggcgagagtttcaggcgcatctcggacctccagctcgacgccttgctgcttgccggcatggagtcgtcgcgcgtctacatcgatggcggccggtacgccctcgtcccgcctgcgacgcagaaggcgcctgtcaaagcgactgctgcttcaagagcctcggccagcccgtccactcctgctgctgctgttgctgctggcaccttcggtgccgccccctttgcgctcggccaggtaccgcagagtgccgtctcccatgctggcaacgactcaggcgagcctgccgctttccttccgacggccgacgacgggcacgcgtcgcccgatgcgacggccgaggtcacctacctgccggcgacgcacgcatcgagcgccgacgtttcggacgaactcaactttgccgacatggacctcgaggacgacccggtcgatgcggctatgcgtgccgccctcgccgactcggacgactttgacagtgatgccgaggctcagcttggcatgaccctgaacggctggggcgaggtcgaggagcgcatcctgtggccgcccgcgtcggcccgcaaggccgcagccgccagagcgtgcgtctcgacctgatgtcttctttggcgccagcgaccgcgacgctgactcccttgctcgtctgccatggcagtgctcaccctccgccggtcgaggcgcccactcgaacgagcggcgtcaccgccctcgacctcctccagcagctcggctccggctccgccctcgacaacactcgcgacctagcccaacctgcctttgcgccggccttcgcgcctgcggcctcacccggcctcttcggtgctgggccgcctctcgctagcacgaatagccgcagcgactcaatctggggcgcgtcgcacgagaaccaacaggccgattatcggtcacgcaccagctcacttgtcccggccgtctggggcgcacgcgagtcaggcaactcgagcccctcggccggcttcggcctccctttgacggattcgtggacccgctcgagcgctggtggtacgctcgtcagcctcggcggcctcggcaatggcggcttcgcccacggccccagcagcctctactcgcctgccggtcagccccagcagagtttcgacgcctcgtacatgcagcagcagcagcagcaacagcagcagcacgcgttcgtgcaataccctgcacagcgcaactcggtcccaggcatgcccggatcgccgtacggtcttccaacaagctttgctatgccgggtctcgcggtccagcacccaggcggccaggccggaccgcccttcaccgacggcctgcggtcaccctggggttgatcgaccgaccctgaatgcgctcgaccgaccgaagttcaaaccccggtcaaaactttacctgccttctctggtagcgcaaccctagctgcagggcaccgcattatcatcgcaatcaacaccgccatctcgcacgagacgttcggctcagccagtgtctgtccagccgctcgacagacgagcacgaaggcccaagaacatgccgctcccagaagcccagacgaggcctctgcagcgcaaagtcggccacgacgcgctctgcggacatgtcattgcctcgccctccttcccttgtcctgcttccctcttttcctctccatttgtctcactgcccactggccgcggcactcttcggcccctttcaaagaatacgccggatgctcctcgatccgcgcctctcgctagtcggccttcatcgtcgagcctccgcgtcccgtcctttattcgcacttccacgagccgtgcctcgagcttgcgatgcatgcccggcctccttttctttccagaagagaaaagctcatctaagcaccaaaagtcgccgctgctcggtcgtcgctcagggccctcccgagctccagcatcagcagcagcacctgcggcagacggggcacaggcgggtcagttgctgcccgcgcgtgaaaacaaggagcttcgacgtacgtaggcctgctgatcgctccacgaccaccagtcgtcaacgaaacggaggccctggctgccaatctcctcggccaggtctgagcggccgccgctctcgacgccctcgaagaaagacatgacgtcgctggcaaaaaggggtaggcaaagaaggtcagtttctgctcttaaaaggaagctacctcacggcgactcactagacgtccgcgtacgagttttgaacgggcacaaagtggtaccagggtatgaggagtggcgagttccactcgcgaaagatggtcgacttgaagacgacgctgtcaggcgtaagagtggaagggactggtcagccaagattgacgctagtgtcggctgaggcgaacgcacgaccccgaagagagtagccgtcgaaagcgggagctccagccgttgccgtcgacctgtgcgggatgagtacgagtcaggacggcgcttcggaagaagggggtgcgtgtcgcgctattgaacgacgcacgtccatcaggtagcggtagcgacccgtcttgtcagcctcgacccggtcaagccactgaaactcctccgccatctgggcacacgtgccgtccgactcgtcgcactgggtcggcccgccggagaagccaatgtcgaaccagcgctcgttcagcttggccctcggccactcctgtgaagaaagtggtcggtcagcacaggccgggaaaggtcgctctgcccagctgggcctgcgcacctcgcgcgagacctggtccttgcgctgcacgaggacggtcaccgagcccggcggatttggcccagcgaactgcgacaaacgttcgcgttggctcgagcgccagccaatttccttcgagtgccagacgccggtcgggctgcctcgccagaacagctggtggtcggccttgtgattccaggagagcggcaggaccgtctcgttgcattggtcgagcggcaggccgagaacatctgtgaaggtcgatgtctgcggtcagagaatagctcgagatcagccttgcgctctcactctgttgcgggcagggcaggccaggcactcacgaccgcttgcgagatgagagggatgagcgtgtgctgacgcgagacagcggtcgtaaaaatgaacgtcagcgacgacaaggcgatgaagtccagacccgccggcagtacgcacagcgtgcggtcgtccctggattagagttccgtgcgaccgcaatagatgtcggtcgttgcggcagatgtccgagctcttttccgagtcgtagacgaacgcctttggtcgcttgtctgctcaggtcaggacaagtggaagggtcagcgaaaggcctctttgcgagctgtcaaggtgagataacggccgcaccgtcgtcgccctctaccgcagacttcttgaggaagcgtgcgcccgacggacaggcgtaatcccacccgggctctccctgctgctgctcctcgccagtcatgcgctgatcgtccggccagacttccccctcgcgcgcgaggatgcgcgagcgagtgacgaccgagtggagtgccgagcgcgtggggaggtcgtccgtgttgaagtagagcttcagcggcaggctggggaacgcgggcagatgagcggcgagtggctcgaggagtagcgccagcgtcctgtgccaaagcaatcgcagaggacacagtgcgtcagatgaaaggatcagcggtcagctcgtcgctcgggccagagtcgcagctggagcgactgactgtgcacggtctgacgttgccggctccgaccccgcagggtcagacacctgcccattgccgctaagtaattagatgaggcacaattcagccgaatagcctcacccaggtcccggtcatctagacgcacctgaacgtccagatgctcgtggagacgcggtcgtcgagctcggcctggcgctttctgagcatgttgccggggatgctcaggtacggctcgaccgcgtgatacgccgtctggtgcggccagggcttgatgccgcgctcgacacagaacgcgtacctgcaacgccgcaaggttaccaaagaggcctgagctgtcagcccggaggcccatcaggagcgcgtgtgaggcgcgacgcaccacttgtcgaagccgagcggcgggaaggcgccgccgttgagctcctgatagagcgcgatggccgtgtcgagcgagacgggcacgcgagcctcctggatcgccgccttcttcttggcttcggcgacgaggatctctatcggatgtcgccggaggtatggcagctcgccgtcatcgatcgtcaggagtccggagcggtgcctctgcgtacgagcctccctcgccggcggcttgtcggtgccggcctggccgagcggagggcggccggctcgcccgggagcaacatggtggacgtgcgggacatggagcttgtcctcgatgtcctcgagcagaatatcggaccggcggttgagcggaaggaggagtaggaggacgaagaaggtgaccggcagcaggagcgtcgacagccgcagccgacggccgatgcgtgccgtcccgagcaccatcgcacaaaggggcgggatgccgtgctctcacgacctggtggcagcaagcaggcgtgcaagctgagacgcgggcggcctttggtccgggggttcgctagaaggaagatggagcggggacgagagagcaggcgaagctggtcgttgtccggggtgcgacacggccgaaccctggcgctgcgaagccacgaggccaagtcatcgcctctcgcctccgtcgtctcgttgcgaagtgcacggcgctctctgcttcgactagaaacacatgcacatcactcggaagagaactcctagactcaagccttgcccgcctcgagcgccttggtgagctccgggacggcctcgtacaggtcagcgacgtagccgacgtcggcgacctggaagatgggcgcgtccggatccttgttgatggcgacgatcagcttcgactccttcatgccggccaggtgttggatcgcgcccgagatgccgacggcgaggtagagctccggagccacgacctggagcagggcggaagggtgagtgagacgggtcagtgcgcgacattcaacagagacggccgagcagaagggcgtacctttccggtctggccgacctggaggttgttgtcggcgtagccagcgtcgacggcggctctgctcgcgccgatggctgacaagcaggacgtagcgcgctctcgtcagctcacgtcgagacaacctttagcaaagagtcgacgaaccggcaccgagggcatccgcgagcggctcaatcatacccccgaacgtctccttgttcttgagcgcccggccaccgctgacgacgcgggcggcgctgccaaggtctggccgctccgacttggtctcggtcgtcgaaacgaacttcgtgatctcttcaaaagggcattccagcacggcgggacaagcatttgaagtcagcctttgtacagcggaagaggcgggacggattgtgacgagcggggacggaccctctccctcggacggagcgtactcctcgacctcagcgctgccgccctcagcgacggccttgtcgaacgccgtcggccggatcgtgacgatcttgacgggctccttcgaacggacgcgggcgatgatgttgccggcgtctggcgggatgtgagcaagggaagtgttgcgatcagcgtcatcgtctccagcttgcagggcggggccagcgcgcgcgggcccgtggacgcacagacgggccgggtgaactcctcgccattggcctcaatcttgacgacgtcgctgatcatggtcgcatcgagcctgccgaaaagagtgcgtcagcagctggggcggccggtcgacacgtgacgacgacgacgcacagggccgacacgcgcgggaagacgtccttgccgagagccgagtgcgaggtgacgaggtgcgtaatcgacttggccggaacgatggcggccagaagaggggccagagctgatgaaggaggatgatctcaacgaggcactctcgagaatctggagcttcggaagagggaggcgacgcacgctcagacaggttgtgctcgtacttgggcgaggtcgaagtgtagaccttgctgaggccctggatgctgctcggacggccgacgtcgcggtcagcgacagctcaaggagaggcccgctcccgagccgagtgacgcacctcttgacgctgtcgaggacgctcttgacgtcctcgtccttgccggtcacgagcgcggcgacctgcggcgcagagggggagcggtttcgtccgatctcgtatcagccgaccggctcccggaggaggcttccttcctgtgctcaaacgtcgagcaagccgtcaacggggacttacgtcgcctccgatcgactgggcggcagtgacggcgctgaaggtggccgggttgataagcccacgcttgtgctcgatccagacgaggctcgaggcgctccgccggctcggccggacggcggcggtagcgaacaggcgcgaggtcgaagcggcggcggcagcacggggggcgaacatggctccaggagagactagcgagagggtaggtctgcaagcgagacgatggttggtggtggttgaagaggagcgtcggagggtcggccgacaggcggtagccgacaccggcagcgcggcaagcaaggtcgggcggggcgggagagcaagcacgcgccagccagccagcagcaacccaggtcgaacgactctccttcagcttcaaaatagccaggacagatggccgacgccggtcccagcagcaccagccatgacgtcggcttgaccggctggccgggccgccgggctcgcctgctcgacctcctcggacgcgagggcagcggcgcgctcgacgatgacgagctgggtcgcctgctcgaccgcttcgtcgcccgggagggcaagcgtcgtcgtacgtcgccgagtctacctgcacgaggtctgcgctgtctgatcggatgttccctgacctattgctgcttgctctttgcagaagaggccgatgcagaagctgacgccgtgcgcatcaccgagcgcgacttcagccgcgtcgctcacgtcgccgacgggcagttcggccgggtgcgttgtcgtcaggcgccactggacctcttttcgaagctccaggggctgacgtttgttctctcggcttggcgtaggtcgacctcgtccgctgcgggctcgaccagaggctttactgcctcaagacgatggacaaggccgtcctccgccggagccgacaggtgcgtctggcgcacacgactcgcgagcaagaccgaccagctcatgacacccgttcgcctcgctcctcagcacacgtaccctgtgcgcgagcggcggatccacacgctcgcgacactcgccggtttccccgcggccgagcggcccgttccgtctttactctgcgccttcacgtcgccgaccgccctccatctcgtcacgtccttccacccgtctggctcgctctgggacatcctctcgctccaccccgacggtcgcttgcctgagcctgaggccagacactgggcagctggcatgatcgacgcgatcggctggctgcacggccagggctgggcacaccgcgacgttaagccgcacaactttctcatcgacgccagccccagcggcccggctcggatcctcctgaccgactttggcacagcatccgaggaaggacggaagggctctggccggctcaagagggacgactgcctctggccggtcgggacgccagactatatcgcgcccgacgtgctcgaggcgcacgaggatgcactcgtccgggccgaggaggaggccgagcaatgtgaggctgggctggaccctgttgcgagcatggcgccgtctacggagggctatgggctcgagatcgattggtggtcgctcggcgtcgtcctcttgtgcgtaaccgtgacgacctgttcgagttcggggaggccgacaggaagggctgacgtcctgcgtctctatcgcagcgaactcgtctatggcgaggctccgttctttgcgaaaaagatcggcgacacctacttccggatcatcaacttcgaggtgcgtccctgtccgcgacgactgggcagggctcgaggctgacgagccgtttcttatttgcagagcacactcagctttccagattcggtcccttcgtccgacctctttagagactttatccgagggtacgcgggctcggtcactctcgtcggctcgtggagactgacttcagttctgcctccctcagcctcttgagtcacgcatccatccggctcggcaagaggggcgtcgtttcggtccgatctcacccctggctcgagggctaccacgaagctatcgcatctgaaggtgcgctaccctcaataatctgctcgttcacaaccaaggctgattgccgtgcccgcgccagacctctttctccctcccgcggccgcgctcctcgagccagacacctcgtctgtcccacacctctccgcgaacgacaattcggcctttgccttctcggacctctttgtctcgtccccgtcgatttcggtcatcagctcgcggccgtcgcccagacctacgccggcgcaagatgcaagccgttccgccgtctctgcgaccggctcacggcgctgtgcgtcggccctcgaccgcggcaagtcgctcgcttcttggcagggcggggtacttgacgtctttgccgatctcgcactctcgtcgccaagcgctgtcctttctggcaatgacgagaaggacgacgctgaatgggacggtttcacctggggtccaactctggacgcgtttgacccggccatttcgatcggcctgctgccagacgactcaattcaccggccgctggcgacctcaacgtccccaccaacggttggtctcggtatcacccgctctgcccagacgccgctccgaccgactacgcttgactcgcgcgactcgtaccgcacgccgctccggccgtcgccggtgctcagcggaagcaccgccaccggtggcctctcgaccgtccgccggagccggagccgaccgatctcggagcagcgccagctccaggagatggtcgactgcgtcggtctctcggcccggcggagggtgctcgagagcggtcggaagcctcggctgctcgtcctcaagcggttcgactcggaagcgtcgggtcaaaggactatcatcttcgacctgcctcgggtcgccgccggcttgctgcagccggacccctttcttcactcggcttctccagctgagccaagtccgacgccgccgtcgccaccgctaccggccgactggaccggccgtctacgagtggcgagtggcgagctcgcccagattgagcgcaagctcgacggcgtccgccagcgggtcctcggctgggcagactagccccgccctatcttatcgcatcactctttgacctcacaatcattgtacctcgctcgaccgagcacgtcgcaccaatgcatgtctttgatccattctctctcgtccgccgtcggtgcactccgtcgactgtacgactcaattctggcgtgccgcgcgcgcagcgtccaaaaacctcgccgcgcggcagaccccggccgccgtcgctgcacgagctcctcctgcccgctcctcaccacttccttccctaacctccgcagcaacatgagtaaagcgagtgcgtgcttccggctcgtcgctgctgcctaactgcgcgactgacgccgcttcctccccgctcgccgcagagtcatctctgctcgaccagctctcgctcctctcgaacccgacgccggtcgacctcgacccggaggaggcctacagctcgctctcatcctcgaagcagaccaagtcgcgccgggccgaggatgaggatgacgacgagatggccgaggacgaggccgccggccgtggccactatatcgacgtcgcgtgcgtatccgctgcttcagcgagctcgcgctcgccgcatgctcgccgctcccgcgctcagcttagctgaccgtttgcctgcctgatcgccccgcccgcagtccgagtaaactacgacgggacgccgaccagcgacgacgagaggccgaagaccttgagaagtacggcggcgtgagggccagccggaaggagctctttggtaacggcggccgcggctcggcgagcgaggacgacgacggcagcgagaacgaggaagaggagggcccggacaacgtcgaggacgaggaggacgaggacgctccctttggccaggctgaggatgacgagtcgtcctcatcggacgaggacatgcccttcacgccggctgccgctccaacgccgacggcggctccgaccgagagcctcgaggcgactcagatcctgtcgtcgctccgccagtcgcggtccgaggacgtctccaagggcctcgccgtcaagaagcagctcgagttctttgagaacgtccttctcgttcggatgaagatgcagaaggcggtcgtcggcctcggcgcgctcaaggtgcgtttcgcattggcttgtctcgagcaccagcagcgtccctaacaaggctttcttcgcccctgcagacgcccgaagtccaggaggagcttcgcaccccgtcagatgcgacgcaacaggcggtcgatgcgtgcacgaaggaggctcagaagctgtcagagggcctctttgagatgcgccaggtgcgtccacgatccctgagggtcgccagtgtcgaacgggaaggctcaccgttgcgtcgttcctctaatcatcaggccctgctgaaggccagcgaaccctcgattgagatcccggcgccgaaacgccgcaagatctcgccgctggccgactcggccgcgtcgtcctatgcacaagatgccgcggaggatgcgcttgccctctccgacctgtgcgccccacctgctgaacgagagctgcatgtgccagcaagacgctgacctccagtccattcctgcttcagcgcgcacccgaacctggtctcgacactccagaaatggtcgaccaagatcctagctgcccagggcctgacgaacctgaaccgaggcgagaagttcaagtccgtcaagctcggggcgctcgagcagatcacggcctcactcgagggtctcgagggccggcgcaaggtccagcgcttctgtggcgggagcgacgcgcttgccgcgaccgatgacgcggcggataagaagccgagcgcgttcggtgacgacaaggagttttaccagagcctcgtccgcgacatcatcgaccggcggagcggcacgaacggcattgccgatggtgagtctgcttcgcaaatgtcgtcgacctcgcccttgactgaccgcgttgctccttctctctcaggcccgacacacgcgaacctcggcccgaaggtcaagaaggcgtcgctcgacacccgcgcgtccaagggccgcaagctccgctacacgccgcacgacaagatcatgaacttcatggcgccgttcaagcccgagggcagctggcacgacgagcaggtcgacgagctgtttggcagcttgctcggccagcgcatccagctcggcgaggatgacgaggagatggaggacgcggacgagaccgccggcgacgtcggcctcggtggcctgcgggtattctgatgacccctttgcttgcatccagctccagtgccagccaagggtcgcgctatcagacagagatccaagccatgagatggatcaaaagagagacggaagggacagaggcgagagagaggaggaagagggcggtttcgtcaaggatcgtcaggagggcggcgggagaaaagaggaaacgtctacgactgggtgaggagaaggagactctaaggggaatgcaacatgcaaagcaaggagtcgctcggtgagcgaccgatcactggccgccgacgagaccgaggtttgagacgagcgcctgcttgtcctcggcgctgagcgtgctgaggaccgcgaggaggcccttgagcgcgccgtccttctcagtctcagcaaacttgacaatcttggtcgagacgtaagccgagcgtgtgtcggcaacggcggcgccgatggcggcctggttctgctcgatccactcggcaacctgccggttcgacgagaggtcgcacttgacgagattgacgagcaggttgcgccggtcgaggagcgagaggtccgggttggccgtcgcgtagcgggcgaggacgttctcctcgttgagacggcgccggagccgccagtagaagaagcgccgggcctcggaccagacggcgcgcttggcgcagcccttggcctccatgcggccgacgcggtcgtgcaggtcgacgtagtggtgggcaatctggaggaaggtcgggtagagggccgtctcgcgagccttcagcagctcgccgctcttggcccgctcctcggccgaccggctctcgtccttggactcggccttgagccgggcgtacgtctcgtcgaggcgctccatgttagcgagaatcttgtcgcggcggtacttgatctcggcaatgccctcgggctccatgatgccgccgcgcgactcctcgtcggcgtacatctccatctgggcgtcgttgatggtcgggtcgaggacgacccaggcaccaccgcgctggaggagaggaagagagagggtgggaaagtcagcgacaagcttggcacaatgagacgaggaaagacaagacggacgagctctccgttggggacgatgtagacaaagacgggctgcttgaaggccgagagtccgtcgacgatcttggatccctgcttgagaatctcgtcgtactaaatatcggaaggggaagagggtcagtcccatccgcccggcaggagagcggagacaagtagagcgacgtaccatgtcctgctggccaccggagaagccacggatgttggcaaggatcatgagcgggaggccctcgcggttgatgtcgtagatggcctggcccgtcttgtaggccgagttgggcgtccagacctggccggcctccatgaccttctgctcgtagccagaggcgttggccgggtcggccgggacgatgcgctcggtcgtccgcgtctcgacggcgatgacaccgagcggcatgccgccaaggcgggcgcggccgcagacaatcgtcttggcccactcgccgagcgtctcaaagaaggagcccttgtcgaacaggccggtgaggccctcgtcctccttgccctggagcagccagcgggggtcgtacgggcccttgggcggcgagtaggtgaccggccgatcccacgtgtcctgcgagggcgagatcgggatagccttgccgcgcgattcggggatgtaggcgagccactggaggaccttgagcgcgccgtcgaggtccgactcggcgacgaggtgcgacgtgccgttgcgggccatgatctgcgtgcctccgagctggaggttcgaggtgtagacctcgcggccgagcatcttgttgagcgcctgggcgcccgtcaggatcatcgggttgccctcgacctggatcgaacgctggccgagccggacgaggtaggcaccgatgccgaccgagcgcgcggtgacgagcgtgagcgtaaagatgccctcgtcgtaggcccggtgggtggcaccggcgataagaccggagccgcggagtgactcgacaccgaggccgtcctggaggccgatgatgccggtaatcttgtgccggcgctcaccgccgtcctcaatctcctcggtgatgcagctcgagcccttcttggcgagcgtcgagagcgtctcgggtgtcaggtagaggtacttgatgcccttgagggggttcgagtcgtcgttccaggcggccttaaagagatgcaggagctcctccgcaatgccgagccgggcgcccgagttggccgagaggtagatgcgcgggaggccgcgggtccgggcgagctcggtcgccttgaagaagtagtcgtcctcgggcgggccgaacgaaccaatcttgaaggtgatgtcgttggcgatgacgatgatcttgcggcccttggggtactcgggcgtgaggagggtaaacacccaggcgaccatgccgcacgagttagagcccggcgggcgcgagacctcctggagctcgttgttctcgtcaaggacgagctccttggcgatgagcggctcggtcgggatctggaggccggggatcttagccgcggcgtcggtccagaccttgcgcaggctctgcaggaagagatccgggtagtcgtctgcaatgggcggccaagggtcagcatcggctgcaaagggagtctcgcagcgagaggcagactcacatgcgtaggtcgtgccgatgaggtgggcctggtagcgccggggctgaaggctgttcttcgtcatataggcgtggttaaccggctggagatgcgccggtccgggctcgccgattgacttgaggatggtcgagcccttctcggtctcgatctcctggtaggcgtggtacttgacgacgaagcccgagacgttctcgatgcagcagcggatgggcgtgacgttgccctcctcgtcctcgaggaccatgcggatctcggcggcggtgacacgcaggcgccagagacctggagaggaaagaaagcagacctaggttagcgaacgcctttgacagctcaggccagaaggcaaggactcacgcttgccgtggcgctcgatgaagccggcgagggcctcctggacgtcgtcaaagtcgaccatgacgttgtagacgaagttgatgccgacatggttgcagtcggcgttgcgcgtctcggcgccgacaacctcgagcgcatccatgatgtcagtaacgagccggtcgcactcggaaatgaggtactcggccgtccgcatcgagcctaacagagttggatggaccggtcagccaaaagccttctcgccggcgcaaccgaagccagacataccctggaggcggccgggccggacgagggcgcggatgaagaaacggacgtcggacgagttctccttgccctcggccttgtagatgtctgtgggagcggtgcaagtctcgtcagttgaaggtcgagaggtgggaggaacgcaggctggtgtgcacgcacggatttgccggttgtcgacaaagatcggcgtcacgttgaacgacgacagccggttcaactcgagctggctcgcgagcgcaggctcgatgttgcgaatctgctgctcctccttccaggcgccggcgccgtccgtctggcggaaggtgaaatacgacgggtagacgttcttgcggcagacgaggaacgtgacgcggcggacgccccgcttgcgcagctcgtccgaagcggcgtcgaggagagcggccgtgtggccggcccagtcggcgtcggggaagtcgttctccttctcaaagacgcggagggcaatgttgaggacgttgggcatcgcgctgtccttgccgtggcgctgggtaaactcctcgtgctggtaaggcgggaagtacgagaggacgttgcggaagccggcctgagcctcggcgagcgagttgaacgacgtcatgacgccggtccgcatcggctcggtctgactctgcttgatcttgtacgtgaggtccgagagcgagccgacgcggaagacgtcgcggctcgagtcgacgcggggcgtcgagggctcggcgatcggctggttgagcttgaagcgccaggtgacaatgccggcctgaccgggctcgccctcctcctgctgcatgtcgaggatgctgtactcgcggtaggcgcgcagaatgtagaccgtgagcgaggcgaggacaatccaagggtcgtcgtgcttgaagaaggacgaaaggacgtcgtagacggtgaagcgcgagttggagagctcggcaaggatgtcgatcgagggcgcgcggtggccgccgcccgactcgccatagtagttggtcgtgaccgccgaggtcaggatcttctccatctggttgtggcgctcctcgtaagaagggagcgagcacgagatgaggatctcgcgcgccttgagcgagaccttgcttgcggccgggatcttggacggcaggtcggcgagcgtcttgagcaccttctggagcgagacgccctcgggcgtgtggaggatgtccgagtccttgatgtgctcgaggataagcagcaggagcttggaccggccggtaaggcgtgagtgagcgaggacaagctggatgacctcctctaggctctcgcgcttctcgtcgcgaagcgagaggacgatggcctcctcggagccgttcgcaaaggccgactcgacagcgatgtagcgctggaggatctgcgagtagatgaacgaggcgaagccgcgggggccgccgacgttgcgctcggcgagggcgcggatcggctcgacctggccgcggaccgcggtgcggtctccgggacgtaggttctcgatgtagcgctccatctgcttgagaatcttgctcgccgggaactccttttgatgggccgactcgatggtggcccggacgtcctcctcgaggtcggccggcatgcggcccgagagggtcgagaggatcgaggtcgcctcgccgaacgcgagctcagggctcttgagcgtctcggagagcgagcgcaggacggcacccatcgagtcgctctcaaagccctccaggaccgagtagacggtcgagagctggttctctagcagctggtgcggcttgttgccgatgacgctcgggttgcccatgtcaggaatggtgccctcgaaggggctggccttcttgacgcgcgagctggaggaggcgagcgatagtgtcagcgaggcatctcacgaccccaagggactgcgagggacgcacgggtcatcgagactaaggataccgatgatcgctccgggctcgacggtgacaccggcctgcttgacgaactgcaagaggagtagacgggtcggatcagtcacggcgtgtcatgtttcgtgggcaaagaaggcggcgcacctggacgtgaccggcctccatcgcgatgagcggcataatcatcttcatgacctcaatctcggcgtagacctcgccagggttgacgtggtcgcccgagtcgacgaggaagcggacaatcttgccgggcgagggcgaccggagctgcgtcctgaagaggcgaggagggaaacgggcgtcagtctcggctctgcctgcacaaaaagccggagaggacgaacgggtcgttctccttctcgatcaggcacgtcttggcgtcgacttggatgcggagcgtgcccgcgtcgtcgcgccagtagagcgtgtgcgagcggccgccgagcaggacgagcatgccgccgtccgcgagaggccggatgccaacgaccgtcttgccgccgttgacataaagtctgtacatgttgagcgaggcccgggcggcggtgatgttgtagcggacgccctcgtagatgaagtcgacggtgaagacggtcttgaggatctccttcgaagggacctggcccttctcgaggacacgcttgtactcggcccagcactcttcagaggcgatgtgggctttaacgacggcgccgcagaggacggcaaggttcgagtcgggccgctcgctcgtgagcttgttggctgcaaggcggagagcgagcaatcagcaacagctcaaagggcgcacaagaggtggcaggacgcacagatgaggccgtcgagccacgcagtcgtgatcgtattgtcctcaaagtcgctcgtctcgagcagggtgatgaggtactcgaccgtcgtccggaagtctccgcggatcgagagctccttgagggcgacgaccatgttcttgcgtgcggtcggccggtccgagccgtaggcaaagacgtggccgaactgcgagtcggcaaactggaggacggaaggagaaaggtcagcggcgagcagtacatgcgagacaagccaagggcgcgcacgctgtggattccaccggcggcgccgaccgaaaagtagccccagacgttcgtgttggagcggaagttgagctcctggatgtcgccgcccgagggcttgaagccgtcctcgggattctcggacgtgatccggcaggcgacgacgtggcccttgggccggggcttcttctgcgactgggtagactcgggcttcgagaagtcaaagtcgatggcgttgacgccgtgggggtcgaggccgtagaggacgcggatgtcgcggatacgcgagagcgggatgcccatcgcaatctgaagctgggcggcgggcaggttgacgcccgagaccatctcggtcgtcgggtgctcgacctgcagacgcgggttgagctcgaggaagaagaacgagtcgtccgagtgcgagtaaaggtctgagcgcagaaggcaaaaggggtcagcgcgagctcgatgaagccggatccagcgcatgccgcaaactcacactcgacggttccggccgagacgtagccgacgagcttggcgagccggacggcggccttctccatctcctcaaagcgctcaggccgggcgatggtgacgggggcctcctcgatgatcttctggtgccggcgctggaccgagcagtcgcggccaaagagcgagatggcgttgccgtactggtcggcaagcagctggacctcgagatgccgggccgagccggcgagagccatgacaaagatgggagagcctagagggagaggccggcagcagaagaggtcagtcgaggccggctaggaaggaggagcagacgatcagagccgagacgcaccgggaacttcggcgacgacggcggcaaaggcgttcttgaacgtggcgccctcggcgaccatgcggatgcccttgcctcctccgccctcggaagccttgatcatgacggggaagccaatcttctcggaccgggcgaggccgtcctcccacgtcttgacgcaggcgtcgttatacgggccgtcggggacggtgacaaagccctggggcgacataacggtgtcctcgatgccggtgccagaccagggcatgcagggcaccttggccgactgggcgacgatcgtcgacgaaatcttgtcgccgagcgagcgcatcgccgagccgggcgggccgatgaagacaatcttgtgctttgacgcggcgagcgactctggcaggcgtgggttctccgaggcgtggccccagccggcccagacggcgtggacgcccgagcgctcggcgacgtcgacaatcaggtcgacgttagcatagttgttgttgttggttccgccggggacctcgacaaagcggtcggccatgcggatgtagtcggcgttgaccttgaggtcttccggcgtcgccatgacggtgaactcgatggcgcgctcgtcgccgaactgctcgtacgcccacttgcggacggaccggatctccttgacggcaccgataccgttgttggcgatgaggacctggagagacagaaaacgagccgtcagccttctgaagggcagcgacgacggcgatgcaagcaggaggcgcaccttggagatgaccgagtggccgccgtgactccggacaaagtcggtcacggcagaggccggcgcgacgtcgagcgcgttgcctcctgcagggcggcgcgagagaaaaatggaagcatgcaggcgtcagccgtcgatccgataagaggatacgatgtaggccattgtgcgagctgcagccgaggcaggcaggggagagcgagaggcgaccactctcggagagtcggtcgcggccgttgccccagcggccctttgcgcgcgcgcccccgcccaaaagaggcggccggccgcttccgatgctgcagcccaaaccaacggtccgccctccgaaggctcgcttgagctcgcctcacccgtgccccaagtccgtcgccctgcgctcggaaggcaaaggcagcagatgtgaaaaaggacgcaccgatgaaatgctggacgctcgcatggtcggtcgccatcttgtcgacgctaatccactcctcggacgcgttcaggctggggctcgacgttgtgggcacctttgccgcctcgagtgcaggagaagaaggggggatttggaagggagtggctggccggaagagaggaggggcctggccgatgggtagggtcggggaggggcggaaggtgggaggtgaaggggaggaagttgtggtcgaggtcggaggcaggcccaatccaccggcgggagacgctggggcgttctcgcttgggttcccacgcctcccccgacccgacccctttgcacttaagcccgcagagagccgctcgcgtcggagactttggcatcgagccttagccgaccctccgacggcttccttacatcgagctctagcgtcgggtaggttcatcactatgtgcgacgactctctagtcgcccagctcgcgaccgacggtcaccgacgcgaggcgctgggcttcacgtcgggacgctcggctgcctcaggacgaccctcgacgacctcctcgtccgcaaccagctcggcctccttgacgggcacgatggcgacgccgccgacctggtctgcgcgacggtgctggttgtcgagctccgacacctggacctggaagggacggaggatagcgggtctgtcagtggctatacctctctgcccagtgtcgtcgcgcgacttacttcgatccgcctgatcggccggccctcgtagacctgcgtaaggagtctctcgtgccgcgcaaagatcatcggcgtccaaagtggcgccgtcagcgctggatggccaaactgccggtcgaggtcgtgctttggcgcgagcgtccggagccggcgctgaagctcgctcgccgccgccggtcggttgtcgggctcgccgtcgttcgagccatcgccgccgccgccgtcgatcgccgccaggacaccgtcgaggggtcgggcgagcttggcaagcttgcgccggagactgccgtgacgccgagagtccgagttgccctcgtcgccgctgtcgccttggtcggacgcgagctgaggtgaagaggcttcggcgtcggtcgtcgggaagcgattgaagcggcgcatctgccatcgaatgacgatcaaacgaaagagagcgagggcaagcagaggcccggctgcgacacacgacggcccgacctcacggttctgcagcgagacggctgggttgaggcgagtggcgtcagcagcgagtcgaagatgcagcctactcgcagcgcagacgcactaaggatgaggaaggtgtccatgagagcgacattgacgagcagccggtcgatctgaccatcaaagtgaaagttagcgatggacgagaaagcttgggtgaggaagagggggacgtacgacgacaggccaagcgtcgcccccggtgtcgatctcgctgctgaaaacgtacgcaagctggtatttgaacgtcgccgagctgatggtgagggcgaaggtcgcaaaggcggcgacgagtggcgccagaggcgcgtagatcaggccgacggcggagatgagcaactggcgggcggtttggaggtcaggtcgcgacataagtgccaaacgagtcgctcctgagctcaccaaattggcgtactgctgcgcatataggaacttgggcggcgcggcacgctcgcggacggcgcgcggcgtctggttgaaaaggtaggtcgaagacacgagcaacagcttgatcaggttggcgaggtcgtctgagaaaaagaaggacgtgtcagccttgttagggtcgcgagagtaggtcggcgccgacgtcgacgtacagaaggcaaggaagcctcgcattggcagccaggtcagccaaaagttggcctgcgcgaggtaagccgatgaaattgccgacgggagctctgcgcgagtacgtgagcggggtcaatcccagcccgcgaggcagcaatgaggtagtcgcacccttgagcgaattgatgataggacccgagtcgatggcctcgacggattcaaagacgttggcgatgagttctgttgggagtgcagaagtgtcagcgaagcttcattgacgtcagggcgaagctggacactcacgaaggacgacgctgagaatggagaagacaaagagctgagcggtagggcattcagaggtcagtcgcaggcttggtcagtgcgaatgaggccggggcgcacctgagaaatgatgaacagcgtgtagagccgcttgaggacgacgagctcgagactcgcgaagctgtacgccccttggtatttcgacgtgacgcggagggcgatcggcaggaggacagcaaagatgcccgcgagcaccggcgcgatgatgcctgcagagataaagggatgatggtcagctttgctccaggggaaaagtcgcaaacggctcaccggagacgagcgagaacgactggagggcggcagaaggaggtgtcagccgcgtccgtcgcagcagagccaggcggcacgactgacccagttgttagccgcctgccactttttgaggaaagtcagatactcggagagggtcgccaggttggcgacgaccgagacgagtgcgagcgggatggtgtacctgcatgcgagaagccacgggggccgtcagcccggtgttcggaagagcagccgacaaattgaagacgcaccagaagaggacggcggcgagcaagaagccaaaggcgatccgcatgcccttgagctggccgcgcgataggctgacgttcgaccagatgatgtcccgcggctctggcgcgtgcaggatcttgacgtcgcgagaagtgacgcgctggcccttgatcttggaggcgcaagcatgggcctgagcagcggttgagaaggagacgtagcctggcgagaaggatgcagcgcaatcagtcagacaagcaatgagcgactgcagcatcgagacgcaccgtggctctcgggccgcccaaactgcttccttgcatcggcgatggcctgctcgatcgacgtaatacgctcggtctgatagtcgatggcgtcgaccttgggcacccagagcttccaccatgggcccggacgggtggtaggccgcttggcgccgagcttgtcgcgcttgaggtagctgaggagcgccgactcaagcttcttgactgcgtcgtgctgatcgtcgagcaagtcgggaaggtcgcctagctcgtggcctggtggagagaagggcgtcgtgcgcgaaggtgagcgatgtcgcgcttgagcagacgtatagggcaacacgcaccgagggagacccgaacgggagggtgcggcaggtcgagctcagacatgatggcccgcaactgatcgtccgtctcgatatcctctggaatatgtgtgacctgtagtgatgtctgagtcagttggaccagccgaggaagcgcttgggagggaagcgattcaccaagagacagcgggtgtgcagcgagttggtgaacgagctcccgacaaagtactccatgcgccggccggtcacctcgcgggtatgccaccagacgagcgacatcgcaacgagatctgcaagtcgagctgtcgcgtatcagctgctggtgtcaggccactgcgacgcgagacgcactgaagaggtagcccgctgcgatcgagccccagagccagcggccttgcacattggcgaccgtcagctggctgagctcgttgcgctggtcggaggcgacgtagcgtcggttgtagagcacgttgagcggcaggagaaggccgaccgaagcgagcgcgacaatgccgtggagggtccggagcaggcgaaggaagcggaggaagacggccgcatcgaggccgagcttctcaacctaaagtcgtagaccaagtcagtcgatgagcgagtagaccacgtagagggaaaaggtactctcgatttcatcttcctttaggccccaaagaactggcagccaggcaaagaagccgtcggagggcggccggacgtgtgccttgcggtcggcgtcatgaagctgcttcggcgcgtagacgacgtcgttgcgcggccggagaaagttgaaggcaaggaaggccacgagcgagatgcaaatcatgaggacacactgcgagcgagtgatggagaagatgcgttgggtgtcagacggctgagacgccgctcgggctgagaggtcgcacgtacttgggagatgacggccgggacgccgaccgaggagagcttgtcctggctggagcggggaaccaaggaggaagcgcaagtcaggtgctgaaggctgatgccaagagaggttgatggaggactgactactgctgacccgcctgagtgatgctgaggtcggccatcgtctgtgcgagtcgagcccggaggcgttggtctcggagagcagcttagatggaggaggacgagggaggaagcgtccctccgacgatgcctcagctgtgatagcttcactcttcggggcaggaggtcgggccggccgcacaggctccgagcgacaacggcatcatcgcgtttggccgaggaaggaagagagaggggtgggtcggcggaaggcgctcgagccgagccgggcgtgtcgtcatggcctccgtcgttgccgactgatcgaccggtgcgagcctgtcctgagtatcacgatgactgcgacgcatcggccgtgctgctgacttgtcgtcaaaggtcctggcggttgagaggagtggctggccgatagggagggaagccgagagcagctcgcagccggctgcggacgacgggctttcgatcgcacaggcgtgtttggcgggccagccggctcgtgccagccagccaggacgagcgaggacgacctcggcagcagccgggggatgggcatgctggcagctcggcaggctgacctagctggtagcatagaggtgcagccaagagcatcggtgctgcaggtcctgctgggccgggtggcaggcgctgcgccggctgtcgttcttcgtcttgctcgagacgcgtcctcctccagagctggatgctcagctcgcgacgtgcctcgcaagcagcgcacaaggacagatggtcatctgggagtgtcagagaccgtcaggcagagtatgacatgctggagtctgctcaagacaagttaacctgacttcgttcgtacctcttcggcgccacttttggcgaccttgcctccgccagctgcttcttgacctcgacaaccaccctctcctcttcacgacccccatctgcctgctcaggaagggcatgctcccgacgcgcatcctacgactcacttcgctccgctctcgaaccgcgttcagcccccgaccgaagatgcttgccgaccggacggtgcgcctgagcccgccggaggaggagctctgcgacctgcttgacgaattccgctcgttcgtcgctcggacggcacccagagagccgcagatcgagtgccggatcgcaggaggctgggttcgggacaaggtgtggctctcgttctgttggcaaggctaccgcaggccaggcaacgttaggtggctgacatctcacacgctccttggcctgcccagctcctcggtctgccctgcaacgacatcgacctcgcactctcgcaccacaccggccacccgtttgccatcgccttctcggcctttctccgagcagctcatcccgagatccccatcggctccatcgccaagattgagagcaacccggcccagagcaagcacctcgagacggccaagcaggacctgctcgggctcgagctcgactatgtcaacctcagaaaggagggctacaccgacggcagccgaattccgagcgcgatggtccgtcccgccgctgccatctctcgtaccgctgctggcgagctgaccatgagcctcgactcgcacggcgcaggagtttggcacgccgctcgaagacgcgctccgccgcgacacgaccatcaactcgctcttctacaacgtgcattctcgggccgtcgaggactggaccgagaaggtgcgcctagggccagctctacctccgacagtgttgtcgctgacactcttcgaccctaccagggcctcgccgatcttgagtcgggcataattcgcacgccgctcgagcccgtgtcgacgttcgacgacgacccgctgcgcatcatccgctgcgtccgctttgcgagccgctacaactttcagctccacccagacattgagtctgcgctccaggaggagagcttgcgcaaggccctccgcgagcgcatcagccgcgaacgcgtcgggatcgaggtcgagaagatgtttgcccgtgcgtcctggcggtcgctcgcctcttcgcatgtgacaccgctgacccagccttttcattgctagaccccaacgctctgctctccttcaaacttatcgagtcgctcggcatctggtcgtccatcttcttcctccctcccgccgcgcaggagacgctcgtcgccgctcccagcccagcctcagacgcgctcgccgccgcttcgattcttgcgcagctcctcgcttctccggcgtcgtcgaccctttccgctctgcatccccgcttgacgagcgtcgctggcaacggcccggaacggaagcggctcttcctggcggcggcggccgcaccgtatcgcgggctcgaagtccaaaagaagaagcagaccctgcctgcgcccgagatcgtcatcaaggagagcatcaaggtgcgaagcagatcgacaaagggagcgaccagccagctggactgacgtcttgctctgtcggcacagctgagcaactcggacagcctcgtcgtcacccgcgtctaccagtcggccgacgcactctcctcgctcgtgcgcgcgacgttccctgccgcgaccgagcgctcgtcgattggtgcgtcacgcagcactctatgtcgatcctctgctgacctctgcgctcaaccccttccaggcaacgtcctccgtcagccgaccgttcacgacccttcgcgcgggacagattggtccatctcgctcgtctggtcgctcgtcatggaccttctcccgcattggcaaagcgaattggagaccttctctcgtgagtctctccgctaagagcagctgctacgggcaacctactgacagccccgcctgctgccacagcggcggcacgggacgtcgtcgcctcgtacaatgcctttacgcagcgcgtgctcgaccttgggcttgacacgctgattgaggccaagccgatgctcgatgtacgtcttcctttcggatcgccgcgcttggcggtgagctgactttgttcctcgttactggctggctcgatagggcagccaggttaaggcgctcctctcggtcggcgacggccccgtcctcaagacgatcgccgacgccatcgtctcttggcaattcgaccacccgggcaagggtgtcgagtcgtgcagcgccttcctgcgcgaagagcatgcccgcggggccttcccagacgtccgaccagcgcggccatcaaagaagcaaaagtgatcgcatggcgctcactaaacctcgctcggcccgaggccaggcgagcgtctcacgctcatgctgcaaagcagtctactggcacgctgactgagtcatccacgcccagcctggctgacagctgctgcaggcagcgcgcgcagtgacgctcgacctcgcgcacgtgcagcaggagtggctggaggctttcgggcgtcagctcgatcttatccggaacgaccgatggtcggccgctactcgacgaaggccactctgctggtgggtcgggcggcgccgtgcggatcggcagcggcggcagcggtggaactggtggaggcaccgtcggtttccaacggctggtcgcggcgatgctgccgtacgccgaccgaggagtaacccggccagacggcggtccaggtgtcgtcggtcgctgcgagtcgaccgacatgcgctcccaatctgactctgacgcggccgggctcgaaacgtcgatccttgacgctgatccgggctggcccttgctgaccttggtttttgtccggcgctcgctcgagccgtctttgccgaagcggaagatggaggccaggctcggacgacgaggcgacttgcgggcggcgctcgagctcaagccagagtcgacagccgccagcgtgccgcccgatctggccgtcgccatcgtgctggctacactccgctcgccgccgtcgaggttcagagcgtcgcccgccgggtagtcggccccgatcctgaggctccggagaaaatccttgaggcccttgacaccagctcggctggcgcgccgctgctgcggcaagcccgcgttgccctcttgcggtcgagccggccgatcgtcaagagaatcgccaaagagcaagcccgccggcggcggtgcactgctgttgtgcgagtgtgacggcctcgtttggccggccaaagcggagaccggcagcttcttgaccggcgtcgtcaacatccctcgcaggacgtcgagctggcgctgcgacagctcggtacggccggtcgagcctcgccaacgttcaggagaggctctgggagggccctctgacggagacgctgccggaggaatacgctccgtccgggcgatcattgtcaccgctctcgctcgctctgagctcgacgtcgagcacgatgacacgcggttgtcggcggcagagatggctgcctcgtcgaggttcgtgctggccagcttgacgaggacttcggccatctcccaccacggctcgtactctccctcaagagacggtagacgatcggggccagcgcgagtcaggagaccgagttgcagctcggcgtgttggatttgtagccgtttcaagtctgctccggcccgttcaaagttagctctacatcgggcagaagatgcgaggaaaggtcgccgctcaccctggatcttgacagcgaactccttgacggcaccgacccgctcgcgcagcgccttctgcgcattggcgacgcggggagggatccgcagatcgctgagactgttgcgccggccgagatggccgttggtaggcggcgtcgacgtcgaccgctgtggctcgcccgaaggcagggacgaggttgggaggaagggggagccggcaagcctcggcatcggccggtcgtagtgggcgggcggctgcagcgggatcgagttgacagaggacgatgtgcggtgtcctttccgctggaaattcgaagcacgagagctgggtcggctctctaccgtctcggtcatcaggccggatgccgactttgactggttctgatcatcctcgagcaggtgtggtcgccgagtcggctgcagcgacgccttggtctgaggtgtagatttcgagtgctcaaagggcggccgggagcttgctgggacgagaggcagaggcggaggaggcatgctggcggtcctcgcggaaggcgacgggtgcgaagcgatcgtcttgggtcgcacgcgaggcgacgttgcgatggacgatgacgtcgtcgagcttgagccgcgccgagttggcatgtggaagccgccattcgagtacgtctgtgacggtgagcggcgaagggtaggcggaagtggcggtggcgagacgacgtatgggccaaagtagtcttgagtcgttgactcgaggttgagcggtgccgggccaacgatcgaatgacgcgactcgagaaagccgctgatccgccggagagcggcctgcggtgaggatgaaaaccggggctgctgggccggagagtagactgccgacggagtccggcctttactgagcgagaaggtgcgctgcaaagaggacatacctctggcgatgatttgccgcggcgacgtcgggagtatcgggtggtccgtgttgtcttgaccactgcgcccttggccatcgtctactgtggagtcgacgagacgacctgcgccctcgctagaggaaagctggttgctcgcccgcgaccgcttcttcagccgtcgccgaggcttgccatccgagcgtaggaactcggagatcgtcaagccagagccggccggtggcgaagcgctaacgctcgggctcgaccagtcgacctcaatcggacgtgtagatgacctcgtcgacgaggatgagatcggcgcggctacctggtcggacgagctggccgacccggatgaggagggtggccgaaccagcgctgcaaagacgctcgagcccgcggctgcctctgtcgcaggctgacggaaaggaaacggctcgagcaggcctggacgtcctgcgacaaccggggctggcgaaaaaggcgtccgtcgaagcgtcgcatctgagctagctcccgtcatctcgacgtcgccgtcgccagccgtagccttggtagggccggcggtcgagccccagccgagcacagagctccccttcatccgcttccgcaagcctcgcgagccgtcgtcggcatcgacactctcgttgctcagcgactgctcgagcattgagctcgccgagtcttcgggctcgctctctgcccagctgagcgacgacagggggcttgaggtccgcgctggggtcggtgacgcccgcggcctgggcgagcgcgagctgtcgagctcttggtattcgaactcgtcgtcccagcgttcggccgctgcaggagagatcagaggagggacgaatcagtggaagctccggcttgacctgaacagtcgagactgacgttgggcgctttgtgcgcgctgcatgcttgagggaagccgcgagctggctcgaagcggcacggagaagagggcggccttccggtcgtcttcgagcggcaagactgagctggaggagatcagatgactgaggtgcgaccaagccgagattttggtctggtcggaagaggcgtcgggtcgagtgggcgttcggagggtcgagctgagggccggccgacggtcgcccgagcttgcccctttcatcgccgtctccgagcttcagccgccgaactgcatcgccgaggctgcgcgagtgcataccggtgctgtcgaggtcctgaccgacgatgcgcctccctctcgccctttgacgctctggatctcttcgcaagctggggtgaggggttggtcgaaacgatgtggatcgtgctctccagttgtattgcgggcgtcagggtcgagcggtcagcttgttctgagtgcgccggcgtcatgcgactcggtcgaaaaggcttgctcaagcacgacaatggtgaaagcggaagaagcaatgcatcgatgcgagcgagcgggtacaagggaggcgacaaaggatctagtgagctcgccgacagagggcaggcggacatgtaggtttcagtagcgggtggcgggagtgtagtgtgaacaagcaaaagtgtgagaggttggcccgagagtgagagaaagaaaggtctacaaaaagaggggtaggggagggagggcctagtggcgctcgacacgctcgacctggaactcctcggcctcgagcgtcttcttctcgtcgccgtcgttcgagccgccctcgaggtcgagagccgtcttctgggcggggatgatggcgccgccggcgagggcgacctggtgcgcgagctcgcccgaccgggtccaagccgagccagactgggtccgccagcagtagaagccgaagaaggcgacgtagaggaaggccgggaacgagacccacatcgacttgtgcgtgtcgtagtaggtggcgatggcgccctgcagaggggtgaggacggcaccaccggagacaccggcgacgaggagcgaggccgcccggcgggtgtggcgaccgaggttggccgtcgaaatgacgaagatgacggggtacatgcaggccatgaggaagtagacgatcatgaggcagccaacgccggccatgcccttggtcgtcgagacgacggcgatgaagacggcggcgagggtggcgttgatcatgaggagggccggggccgagatgacagtgaggagggccgtcgagatgaagcggccgaccgtgaagatgatgagcgcgtacgagaggaagtttgaggcctggggcttcgtcatgccggcgtccctggcgtagttgatgaagagggcgccgatcgcgacctgggcaccgacgtacatgaactgggcgaggaagccgagcatgggccgggtctggcggatgaagggcttggcgagctggtcggcggcggcgagggcggcgggcgactcggcgagggcgtcgacctcggcctggaggtcggcctccgagacctcgggcaggcgaacgaagaagaaggtaacggcgaggatgatgcccatgcccgagacggcgaggtagacccactggacattgtcgaggttgttctcgttgccgcccgagaagaagaacttggaggcgataagagggccgacgaacgaggcgacaccgttccacgactgcgagaactggagccggtaggcagcggggccggccgggggcataacggtgatgtacgagttggcggtgacctcgagcgtagcgagaccgcaggcggtgagaccggtcaggacgacgaagccggcgaagatggcctgcgagacgaggggcgggtgggtcaggacgatgagaccggcgggttgtcgcggagagctcgactgacctgcttgttgtcgcctccagagaacttggcgacgggccagaagaggatggcgccggtcgagtagaggcagagacctgaagttgtaagtcgggtcagctcgagctgccaggcgagataacaggcacgagaagggagagcagcgcacccatgatgatggcaaacttgtagcccttgcggcggagaacctcaccggcgacgggcgagaaggcgaagtaaccgatgccgaagtaggcgacctggagaccggtcgactgaagcttggtgatgccgagaacctgaaggaggagaagcaggagcggtcagccagagtgcacggcaggactgaattcagctggcggagacgcgcctgctggaaatgggagttgaggacgtctaggagaccgtagcagaaaccccagactgcgaagcgaagaggcgacaatcagctcgtgtgcagtgcaacaagaccgatcggggtgactactcacggaagaacagggaggtaacgagaccgaatgcgacgtagtactcgcgcgtgacgatgcgcgtcttgaaggggttggcagacgtggccatcgggccggctcctccaggcatggtcgatggaaggtggtggttgaataaggaaggcgggcgagggagggcgagctgagaaggcggaagggcggtcgagagcttgagggcaggagggatgggtgagaagaggacgaatcactcgccccgctcgacctttatacaagctaggctcgacccaggcaggaaggggttcgaggcgttcgaccccccagccaaggactgagcgttcgagagccgggcgctttctccagcatagcggggtaggcgcaagttcgtcgagtggggtaagctgccttccatcgaggcccgctcgttagtgagggcgggcaccgggtcgtgtgcagctcgctgtcgaaaggggtggtccagccactggccggcggctggtgagcgcagagtcagccacaagcggcatcggccctcgcggtgggcgaaatcgccggcggcagatgccaacaaataaacgaaaggtccacggccagtgcggccgagtcgcgtcccttcgtgtgtcggccacgccgcggcgggcgccagagatctggacccgttcccgctgcgcggccactcttttttcgtcggaagcagcagcagcagcagcaagaggtcaacgtcgccatcgagcattctgtacgccagcagagggcagcaggaccttggtcatttgggcgccgaggacgggcagtcagaccgcaatgtgaggtcaattcgagcctaagccgacgagcccgctgcgaaagacgcgcccgaccttgctgggctgatgggcgaaaaggcgactcggcctgcggcccggccgaccgtgcttgctgtctcgaacgtcaggaagtctcttcgcccgcaacggagcctccacgatcgatccctttccccacgccgcttggcctgactgcgtccgaagcccaccggcctcgcacgacgaggcccgcggcagtggcagccgagcccgcacgagaatctgcagccgagcagcaggaggcagcagagttgagcgagcaagagcagccagctgcctcgtcctgactcccttcctgcaggccaccgagcaagtcccgtcaggcaagcacctggtcagcaccacgatcagccagctcgcggccgcagtttctgcgcgcccagcaaagacgccaggaaggatgagagccagacaggggcgcggatgtgatgatgcgatgcggcaaacggccgcaaaaaacgccaccgtgcgggccttctggacgtccagttggccgtcgaccgtgacctgggtcgcgctctgtaggcgcgcccagcttagcccagctgctgcagcagagcaggcgcgcagggttctggcgggcggcaaggtgacaggattatcagcgtccgtcgaacctggctgggttcgatcttgccggttcgtccaaggtttgtcggaggtcgttccggcagccggtcctcccccagcgtcagccccccgaccccaacttgtctagatcgaacgtccaccaactaaaggacgaggctaggaagtcagcagctagtcagtgctggcccggacggccttccacttctgtttcgagtcgagcaaagcgagctactgcgagcgcgccaatgcgggcccgtcccggcgagcggcgtcgtgcagagcaggcaagggcagtcaagactgtcgacctacgcgagcgacggacccgaagccgagccgaccagtaacctcccacgaggagtagggtcagcaacagggaaaggtggggcggcgacgaggtgcaaggcgacgggcgagccgaccgagccgagctgcgagcggcaccaggaggcaaggagggaggaaacgggtcagctcgccgtcggccgtgctagtcatgaacgtcgtatagatgggtaaaatcgggctcaccaggtcaaggtactcgagctggagcgacgtgcagcgtctgcctgtaggggctcggtcgacatgctgaaggtgctggagttgctgtagcatgagcgcgacgtgtcgttccgacgtcggcgaggagcgacaggcgcgacagaccgacgtcgaggcgtgctgcagcctcgccaggcctgctgtcgcagaatataatcggaggcgcacaaaggatgagagggggctctcgacgacgacgacctgcagcccgggctcttgaaggaaaggaggacaaggggctcggcgaaagcgggcctctattacgccgtctgcacggtgcttctggctactccgagcgccgcacgaatgcaccttcaccggccgtcgtcggcggtgtcggcaggccgtctgccccgacgaccgacccaggacaagtcagtcgagtgttcggcaggcaacagccggcggcggcgggaacggcaaggtcgggcccatgacctctgccgacggacagatgcgaggctgttcgtcccgggagccgacgaaggcggtcgacaactcgaggagccgtcggcgttcgtgaagacgctggtaagagaggtgctcatcgtcatccagtcaagctgctggcggcgttgatccagaaggcctgctcatccggtgcgaggccgccctcgtcatcgacgagctcgtcgacccacgcccggagccagccctcgcacccgcgccggccgagtcgcggcttgctcttgaggatgatccgcatcgcctcctcctccttggcctggagaaaggcgaccctcaggctcaggaggacggcctctcggccggccgactcggcctcccagccgccgtcggtccactgtgcgctggcggcgtacgtcgcgaccgcagggtagggcggcaggacgctctgcaggcccgtcgagctggcctcggctgctcgccgggcatatgttgcggcgttggcgagcaactgcggcccgtttttgacggccgaaggcgaggcgaagggtgccttggcgagcagcgaccgcgcgagcgagagccgggtgagcgcgagcaggatcggtgccgtcgcggcggccgcgctcgtagagactgtcgccgacgggaaggccgactggcttgcagtgagaaggccgagcgccgccgtcgagttttgtgtcgcggccgacaggagggtccagacctcctgggtctcgctcggtgccggcgtcgagccgcgcgtcaggagcgctcgtcgagtggcaagcgcgagagccgtttgcgcgtccgaaaggacgcaagtgagctcgaccttctcctctgttggcgttgcttcggtctgtgcgcgcttcatcatgtcgagctctatcaccagccggcggccttcatcctcccagtcgtcgacccggtcctcgatccggacgatgcgccacgcagcgaccgcggtaaggatctcggtatcgcgcggcgcgccgatctgggtgcagagcggtccgagggcgtggatctgctcgatgagcgtcgccgggttgaggtccagaagcgctggggaaggcagtagcggcagaagctggaggtaggtgtcaagcattgttgaaggggtcgtgactgaggcggcacaagagtggtcagcccgtcgcccccctgcctgactcgaccgacaggatcagccgctgacccgtttcctcccatgctcggccagtcaagacgccgtcctcatcctcgtcctcgtcttcgtttaccgagccgtcctcctcggctgcatcgtcgccctcgtcgccgagttccaactcggcctccccctcctgttccaaggcagcggcgcgaagcaactcctcttgccgcctggcgacctcagccaggaccttcgcagcctcggcccgctccggaccgccgccttcgctaaagtcgtccttgacgtcggcgagagcgacaagtgcgacggcgaggttgaagccggcgtcgacgagcaactgcggatccgccgtcaagccggtcgctctccggtaggtcactatcgaccgctcaagtgggccgatcaagctcggcgggaggaggaaggccgtcgagaggtgatagagcgtccgggcgctgcgatggtctcacagcgtcatcgtcaggcgcagcgttcgcgagcgagagagggacgacgggcgcacaggttgtagtgcccctcgaagcgagagccgtcaaaggcgaccgcccgctcgtacagctcacacgcggtctcgtaatgccgcttcgcctgagacagcaagcgatcgtcagccttcgttcgactcgtcggcagccggcagcagctcagcgaccgaccttgtcgccgacgcggtagcgctcgcccttctcctcttgctcgacgccgccgtcgagggcctcgtcaaacgtctcgtatgtcggtgctctgctcttcttcttcttgcttggcagagagatccgctgcttgcgtggcggcatcgtcaggctagaagggaggaggcgaaagctgggggtcgatgacaggaggcaagggccgtgcgcctgctgctcgtccgacgtcagccgcagcccgccgactctcaccttcctccctcgccctttcctccgtctcgatcagtcttcaagcaaaggcaaagccaaagctctccgttctgcaagtttactgccctacccgagacggcgcctcagagagggtcgcaacccggacgacgacgactgcacacccggcccatctcgaccccgcacgcaccgcctgctcatcacctgcctacgaccgccaagcgctgcctcgatctctcgtcgcatacggccaccctcgagacgccgtcttaggatccctagtcggctcgccttgttgcgtagctcgtgactcgccagccgccaagcatggacacctcgtcggccgccggcgggggcgctcctccgccgctgctgctcgcgccgctgctccaggacctccacgcctggctctcgtcgccgacgctcggaggctcgtcgcctctgcccagtccctcgctgaatccagcagggacggcctcggcagctatgcgcgcgtccagtgcgctcttcaactttcttccggccggctcgcgaggggcgacgccgcctcccccgactgccgagggcgatggcggccggtccagctcgaccgcagccgccgacggtgagccggccaagaagaagaaggtcaagtgccggtgtgtcgaggcgtatggcaacaacctctacatcggcacgagcgacggccaagttctctggtacacgtacgacgcggccggctcggtgcgtgctactgtgctcgcctgcttgaggagactgcgcgggcgctcatcctcgtcccttccccgggtcgtccgttactcaggaaccttacacgttgcggcatcggcacaacatctttccccggcgagccatcacctcgatccatctcttgccgtcgatttcgaaggccttgatcttgtcggagacgacgctacactttgtcgccctgccgacgctcgagccggtcccgaccgggctgatacagtcggtccggggagtcgtcgccgtcgccgtcgacgaaggcccggagggcgtcgagggcgagaagaacgtctgcgtcatcaagcgcaaaggtatcggcatcttccggctgagtacccgcctctttcacgtcaaggtgcggcgcagccggcacccgagcagccgacgcgacatccacactaacgctctcccttatcactcggtccaggacgtgcctttgcctgaaccgccggttctcgctcgttatcaccacccttacctttgcatctcggacctcgacacctactcgctcgtctcgctgctcgaggccaccctctcgcctgtccttccggtctcgcagctggccgacccgaacgacctgccgttccgtgtccggccgaatatcgctgtcgttcaggaagacgagttcctcatcacgagctgcgtcaacgccaacggcatcggcgggaccgtcggcgtcttcatgacgggcgagggtgacccagtgcgcggcacggtcgaatgggaggagaacccgcggagcatcggtcagtcagcagtcgactctcagaaggcttcttcacaccgaactgacctcgttcgcggcttcttgcagtcgttcagccgccctacatcattgccctccttcggtcaggcgcggtccaagtgcactcgttgctcacgctcgagtcgatccagaccatccccgctccggccaacatcgacccaaagcaggtctcgctttctcagtctggcttcacggtgccggcgagggagcgcgacgcgcagctgcgcaaggtctctgtcccgctgttcaagctagagcctgccctgcgggccgtcgtcggcgacagcctgcagctcggcggcttcgacgagccgtctggctcgggcctcaccccacccgctagcccgatccaaggccgtagcacgttcgactcatcctcacggccagcagcgagttcgaatcgctcgctgccaccctcgacagcaactcagctctcgcaggttctcctgctctcgtcctcctcggcctggagcctgacgaccacgccagcgctctcgctcgctcttcaagtcctcgactcagcgcctacctcgccatcgcttctgctggaagcgctcggcccgctcatgatgaacgccgcgacggtcggcgagcaagacgacgctgccgttcgtttcgtccatcagaaggtcttccttcgaggcttgcgagacgcgcgtttcggcggctttacttcggagagcacctctggcgacgcagatcaggagacattgggcccagagcaggccgagctttgggcgttggccggaggcgactaccggcttgtcctgcgactctttgtggagatgcgaccaatcctggcggccctcgtaacgggcaaggacgacgtgccgtccgtcgaggccggtcttgcagaggagtggcaggagctgtgggacatcgacgagattagtgagtgcgcgtggcccggcctcgaccacaagcccgccgcgtttctgactttctcaacctccgctcgcagtccgtgcccgtctgagacgcaactacgagccccacctggagcaaaacatcgaggaggcaccggaagcgctggagatgcacaaagctctgctggaccaggcgcgagcgatgctccgtgcgatactcacctctgagcgcgagagtcgcctgaggatagagcgcggcaagggccgcggttggacgcggagctccggcgaggagctcgcaggcaaggtgcgtcctgtccaactggcttctgtgaccgacgctgacgtcctcggcctcggctcggctcagatcgtcgacacctgcctccttgttctgctcgctcagatcggctccacatccgacgtcttgcgtgtgatggactcgactaacctggccgatctcgctctcgtccagacggccctgcgcgagcacgaacgatggtacgcgctcgcccagtcgtcgtccgacctcgaggctcttgctctctacgtcgagtaagtcgcagtggtcgaggtgctccgagccgtgctcttgcgagcgggcgctgaccaaaatgctgccgcctgtcagcatggtagagggcgtcaagcctaatccggattgccctgagccgccgctcgcgtcgatactcaagctcgtcgctcggacggatgacgtcgagctcgtccgacggtacggcaagtggctcgtcggccaggcgagtgtcgacagctcggcagtgtgggcggccatcggcggcgacgcctttggcagtcgatcgaaggagaacgaacaggcacggaggtcgcttctgatgggcctcgtcaagcagcgcgtcaagctagacaaagagtcggtgctggtcaacctcgcagacacgcagacgagtacccttagctgacgccaacgtgcccgctctcagacctgcatctgcgtcccggctcctgaacaggcattcgttgcatctcgacctcatggaggtgcgtctcgcaactcgtggttcgcttcgtcgagtctacctgctgacgcctcgtcacccatcgcaggtcgtgcctcatgtgccggacgagtggccgctgcgcaacatctcgccgtttgtggtgcggtcgctccgcaaggactttcagcgcagggaggagggccaaagtacgtctgatgtcgactgaggccgcgaaccacacagacgcctgacccagctcgatcgcctcctacagtcctcaaggccatttcggcgtccctcaatctgcgcgtcattgaccacgccctcgacgccttcgcgcgttgcccgccggtagttgaggacggcccgccgcccggcgagcgaggcgcagacgaaaagccgaccgtcagcggagcggcgagcgaggccgagaaggccggcatcctgcggcgcctgatgaacgatgtgccgcggacgattaccccctccgacgcgcagaaggagcagacgacgacggcccacgacgaatctgacgaactggacgagatcgcatgatgacacctttggggtttgacaaaaagagtgctggcgcatgcgagacgggcgagagacgaaaggcaggagggatgagatagagagcaaggacggaagagttgtcgagatgcgggacgggagaggatgcggtggtgttgcgaaagatgagtcggcaagaggttctgctgccacattcgcggccaaccaggccctcggcccaagtcgtgcgcaagacgcgggcaagtcaaacaggcaggcccttgttggcccgagtcttgtatgcgtgcgttggtgcggggccggccgaggcatggtgtgctggactctcgacccgagaccggagcggtcggccagcgacagcgtgaaggggcgttgaaaggtgcgccggcgtcgacgccctgctggtcaacgaagagctccccggcgaggaaaggtcggatgacaggccaaagctgctctcatcatcgtctgtgcgtagggaggcagagtgtcagccgcgtagcagttaggtgagaccgcccggtagcgctcacctttgacctcatcagacgtcgagacggcctgctcctgaagcgaccgccggcggctggactcaacacggggagagtcactagaattgactggagtcagccgacgacacactatgcgcgaacgacctgcgtcgagcactcactggcactcgagctgcgcccgctcggccccaagattcttgacgcacttgccgcagggccggcggccatcgccgtcgcagaccttgtgcaaacgctggcagctgctcgcatcgcaaggtcaagtatcagcgtccgcctcgcatgtgagactggcaaagaaaggaacgaacgcaccgagagcaagcgttctgcgaaagcggcggcagtatgcacgtcagcgtcctcttcttttgtcggacgaaaataggagcgtaccttgcactgcgaccgccgccgccgtgacttgcctggcgagctcgtcgccgtcttgcgcttcttggccggtggcgccggtgtgcggcctgatggctcgagacgtttctttccgacggtcgagctggttgaccgctcctcgacaggtcgcgacgagtcaagagcccgatcgcttccgatggaggaccgaaggaccggcggagagagcgcctcagatcgtccgggcagagaagggatgttctggctgacaggcaaagtacctgcagcgcgggagaccggaggttgctgaggtcctgcggccgaggacgactcggtccgccactcgacgctcgaggcgggaagggcgaacttgtcgggcgaggacggatgctgggagcgcgactgacgagagtcgagcgggatcggagcgaggccggctgaggtgctggcggccttctgcggaccgtacgccggagggtggccgaatggcggcggggttggaccaaggtgcgggcccggcaagcactcggccgacgaccgttcgacgtgcgcgtcgcgctccgagtgctcgaagggcgagggcgagggtgccggtggcgaggccgcgggaccaccggatggccaagcgtcagcggcgagcgtgtagatcgagcggccgaacgacggctgaaggtagaagtcttcgccgggctgagtgaccgcaggagggtgctggactggcggcggccagaattggctgacaggaagatgggccgtcgaggaggtcaaaaggtgctgagaggcacggaggtcgagcggcgatggtggagggcgaggccgggcgggcacatgttgatgatgatgatgggcgggcgccgaccaggtcgaccggtggtcaggacctggaaacggcatgaagggcgacgtcggcgagggaagcggagggtgcggtccacagcccatcggctcgccataaaagacgggcggaggcggcagcacgtcaaaagtcgagtgcggcgtcgggaggaacgacggctggaagcagggcgcagagccgtgcatcggctgctgaggagaagggtgcggggtaccgaatgcctcgccgccgaagggtcgccagggctggtcatctgcgccctggaaggcctggcccgatggtggagggtagtaggccgacgtccggccgtacgctgggtggaaggccggcaggccaaagacgtgcggcgggccgaagggctggtgctcgtcgcccgagagcggtccatagcctggacctggagggagaagccgagggagcggtgcgaaggcagggcggtagtcgcctggcacgtcaccggcccaggttaggccgagggacgagaggccgggtggcgcgtgcagggacgagggcgagacggttggcgcgtcaaacggctgccagtgctcagcctgagcagcaagaaacggatcggcctgcgacggaacgggatcgaagccgctggcagtcccgtctgtcgcgctcaaggggtcgaagccgagggcctgcacgagcgacggcatctggtgttcgtaggccggccggttgggtaccggagtctgtttctcatcgtgaacgtctgtcgagagaaggcgaccaagaggcaacgtcagtcactggtcgacacaagcttgctcctcatcgccgtcgagcagagggcggagggtaacgcacctggcgcgcggctccactcggcctgctcctcggcaacgtcggcgtcgagatcgcgctctgaccagcgccaattgatgcgctcgtcgagcgactccatgctgatgaggacggtcggcgacgcttcgttggtcggcggcatggcgggcgactcccgacgttgatgggagagtggcgaggcgaggtggcggcggaagccaaggcaagagcgagtcgcgacggtagagccgaacgaggctggacggacggcagctgtgatagaggggagccgaggacggcgagacgataggagacgagggtctggttgctgaagagcgagatgggtgtcgggagggggagtcgaagggcgacgaggcggtcgcccctctgcagcagcagcagcagcaacctccatagacgcgcctaccgcccgctcttcctgcatctgccatcgttttggcccgtcgtcagacgagatcggcggcgtgacaccctaccatagaccctgttgtgcgtccaaacacgacggccggccggaccttgcgccgggtcgggttgcggtgggtcagcccggaaagaaaggggtcagctggccgagccgcgtccgcctccagaggtcggcgacgggagcggcagcgaggggagggtcggggaccatgggatcgtcgagcgcgggagaagagggaaggatgctaggtggtacagcatgaatggaagagagaccggggaagggaaggcttgcaggggaggggggcgttgatcaagaggcgatgatggtacacggtcgtcgagaatagcaggcggcatcagcagaggcgagaggagagaaataccaggatggaggatcagcttgaaagacggtcgggtcgttgaatgagacgtgaaaggcggatgggccgtgttgaggaggaaagaggggacaaggaggggggcaccggcgagtcgatggtcgacagccagcgacccctcccggcttgccagtccgctcaatcgcgcttggagaccttctggtagcctcccttgttggccggcgagccgccccagccgaaccagcctccgccgctcgcccggcggtcaccaccgctgccgccgaggctaccgtcgtcgacctcgtcccggccaatctcgtcgtacccgctccgggccatcggcgaatcactccggtcaggcggcgagggcggcatcgagcttgacgaaggcgccctgccgctggctgggaggtgcgacggcggcgaagcgagggcggcaagctcggcctcgagctgggcccggcgcgagcggacgtcggtcgtcgacagagggcgggacgagaagccagacgaggtggatgaggtcgatggcgtcgaggaaacggagggccgaagccgaggctggttggcttcgaaggtctgcgtgctacgagggacagacaggttgcgggcatgctgctgctgttgcggctgggcgcggcttggcccggcgtcgccaaagcgggcctggccagcggcgatgaccatcggcgcatactgctggacgagcgaggccgcgtacttgtaggcctgcgagtggggctgaccggcaggtgggccgccggacgcgtcgttataatcgggcgtcggtgcagccgaatggagcgaggtcgggacgggtgctgcggatccgccgtcgccgtcaaacgaggcgccgtcaaagcgcggccccgaggacgatgatcccgctgctggaggcgcctcgggcatgaacgcagccagctgaaatgatgcgtcaggaggagcggtcgtcagcgtcgagcgacctgctgcgcgcggacgttgaagcagaaagggaacgactgacgttgagccgctcccgagcgagcgtccagacggcggcgaacgctttttggagccaaccgccaacagtatagcggaggtcaccgaggtaggcgtcgacgtcacgctcgtgcgagaggaagagcggctcgagataccgtccgtagagcagcgtcgagccctggtgacgagtccgccaagcgccgcagagcaagaccagggtcagcttgcaggccggcagattctgcgacacgatggacgcgactggacagagcttggacgcacctcggtctgcggggcgaccatccagaggacggcgagcagcttaaactcgctgtagaatggcagccacgcgagcaggccggccgtcgcgccctcgacggccgtccacgagccgatgaccgaccagtagacgagccagcgctcgagctggccggcgtcgtgggccgagagcgccttgtacgaggcgtagcacgggtagacgaagcccgagacgttgctggcagggcagcagcgcggacgaagggggtaggagggaagggctaaggtcagcagggcaaggtgcgggaagcgttcagcgggagccgccgcctcgtcctgcaggaccgaccagagcgagcgcgagatcaggccgagaaaaaccatcgtcgcgacgggtgataggagatggtcttgctttgggtacgaggaggttcgaaagagctactggcaggacgagcctgggcgatggtcggaggcgaaggagagctgagcgaggtcactcggcagcggtggtggcggccacgattccagcagcgaggttctctccccgcaacgctccgtcgtcctcaggacccggccgaccagagtgactcgatgaaagaaggccaaattatgcttgttcccagaccagcgcaagctctttctgcacaacgctcagattcgaaccattcgagatcgaggcgcacgcccttccgcacgacctcccctcgcgtgaccccccactaaggagcgcccgcctcagtgcttcgtcggcttgctgccgtcgacgaacatgttgcgcgtcgcgctcggtatcgtcgcgacgaggccgtcgacctccttcgtcagcaggacctggcagccaagccgcgagctgtcggacacagacgaaaggggcgcagcagggtcactcgttagcgaggtcttcgccgagattgacagcctcgcgcgacgaaagaaaggctggaacgcacgtgtcggtcagaccaaaggcaaggtcgagcatgtcgttctcctcgtcggtcggttccggcagcgtgtcgtagacgtccggatcgaggatcacatggcaagtcgagcatgcgcacgagcgctcgcaggcgcctaggaagtggcggagcgaatgagtcgtcagcgtggcaggtcgggcgagctgctgtgctgagcgacatgacgctagcggacgcaccctcgaggtcgatgtcatgctcgtgcgcgatgctgagaatgtcgtcgccctcgttggcctccaccgtcttgatcaccttgcccgacgcctccttgaacgtgatctttagcctggcggtcagagaggaactgaataagtggcgagatcccagcaacgatctgcgatgccgaaatcggctatgcaccctgtccctggctctggacgctcgaggccgtgcagcgttactgtcgaccagcgcgcggtaagacaaaggcaagatgagaagagtcatcacgcgcgacccgatcgatcagcaagcgcacagacgtactcggcgagctcgagaaggaccggccggcgagctggcggaggggtgcgctcggcccagcgacggtcgagcggagcgccgacgagctccgcaggctcgagcaggccgtcgacgggcggagggccgacgcagcggcggtggcggtatgccggacgaaggcggcggcgaagcaggtagacatgacgcgagcgggaaggggtagccgatgagaaggcaagaacacagctagctggctcgttttggaacactggaggatctttgctggagtcgagggagtaccggctcaggctgattcgttcgccaggtcggggttgagggcgcggcggcggcgcacagcttggtcggaggcagattggtcagctgagtcgggagcattcaccttgcggctggcccgacgcgtgcggcggcgtgcctgaccttcgccttctcctactgcctcggccgcctctcgacgcgctccctaccatccaccacaacctagcttccagctgcctgtagagcagtctctgcctctcatgcgctcctcgaccggcggcatcacgcgctcgccctcggtcggcgccgtcggcctctcgagctcgccctcgttccctccgcggtcgctcaacaccaccggcgtcagctcgtctgcgtcaacctctcgccttcctccagcccatcgaccgatgtcgcccgaggagctcgattcggaccgcgagcagcttccatcatcgatctccctgccatcccagccgcgcaaggtcgtcggcaagctctcgggcgtcggcctccccgagcgggcgacgcgcaaggtcgctggcggcgccgcagtcgctggctcgaaccgagcaggcccgtcgacgccatcctcttcagcatcagcgtcggcagcccgccagatgacgggcacgcccgttaaactgccacgcaaggccaaagggctcgccgctaaagaggaaggcggcaaggagcgcgtcgtcgtctgcgtccggtgagcttcggccccgccctggcccgacctcccttcgaggtcttctcatgactgaccttctcactcctcccttgcttcatcacagcgcgaagccgcctatcccgacggcttgcatctacgagtttgcgccagccgacaaccttctgacgctcaacgacctgcacccgaccaacgtcaagcgcggcggcatcaccaagggccgcgaacaggagggcgagtttccgatcggtacgtcgcaccgcagtcctgctgttttcttactctcgcactaattgacgcctgatctgcgcgcctggcagaccatctccatctaccgccgacgtcgacgtctgagctctacgagaagctggtcgcgccgatcgtgacgagtactgtcgagggctacaacgggaccgtcttcgcttacggcagtgcgtcctctcgggctcatcccttgacagccagtagatacagtgctgactgacctctcccttctcagtgaccggctccggcaagacgcacacgatggtccgccccagagcagcccggttgccgagactgtttactgacgctgcgcctccactcctctctcatcagggcggcgtcgagagcgacccaggtgtcatcccgcgctcgatcgaccagatatttgattcaatcgacgaggataaggaccgagccttcttcctgcgtgtttcctacctcgaggtgagaccgaccttgccttccctacgcctcggctacacatgctgacgccgtcaacctgcgtcggtctgcagctctataacgagagcttgcgcgacctgctcaatccgaactccaagctcgtaccgacgatccacgagcgggacggcaaggtctgcgtcgacaacctcgaggagggtgcggccccttctactctccacacctccgcgctgcaggttaacgtcccttctcgacttacagtgccggttcgcagcccagaagaggttcagctgcagctcaagaagggcgagaacaaccgccgcgtcggcaagactgacttcaacgagcactcgtcgcgatcgcacaccgtcttctccatcgttagtctaacgcagcgcatcttgacgagtgatcgaataactgaccctctactcaccgcagatcattgagtccagactcattgccgactcgacgacctcgccctcgctcccgcagtcgccgtcacttggcctgccctcgacgtcctcggcaccatccctggcgcagctcgcgacgaccggcagcgctggcaagaccagcggcgtcgtccgtctaagccgattgaacctgatcgacctggccggatccgagaaggcaacttcggatggggaccggcagaaggagggcggcttcatcaacaagagcttgctcgaccttgcgaccgtcatcgagaagctcacggacactaagcctcaggcgcacatcccgtaccgcaactcgaagctcacccgtctcctccaggattcgctgagcggccacgcccggatcgccgtcatctgcacgatctcgctccaggatcagcacgcgtacgaggcgctcgcgacactcaagtttgcccgccgcgtctcgcgcatcgtcacccgggccgagcgcgggacagtcgtcccggaggacgccctgatggagtactaccggagcgagattgccgacctgcggcggcagctcgcggcggccaacgcgcaggcccgcggaccggccatcaagacgatgagcgacgagagctcggacgacgacggcgacgtagcgagcggcggtccggccgaggagacgcgccaagcccgtctccgtgagcttgccgctgcccggatgcagcatgaggaggacgtccagcggctgcagatggagcggaccaagctccagagccagatctccaacatgtgcgcagtctactctctgaccaccttgagcctgatcgctgaacccgtctctctgccatctctaccagggctggcttcatcctaacgagcgaggttgctccccagtcacccgccggaccggcctttggcgcctacaagcccggaaagtcgcgccggcgcatcagtgacatttcgctcggcctcggccggccggacgcccagcctgccaactcgaagcgctttgcaagcgcgatgctggcagtcgaggaaagcccagctgcaactgaggctcggcagcctttgctcgccgtttcgaccgagtgggccgtcccttcaatccctctgagggagcatgaggtacgcttgcgcttcgtctccccgacggcctgacatggatcggctgacgctaatgaacccttcgacgcaggccgctgtctcggctctgcgcactcagctggaagcagcctcggccgactctgacgctcgcgtcgcagtcgaagcgcagttggccgacgccttggccaaggtcgagaacctctcggcaaccgtctctgatctctgcgcccgagagacggctgcttccgaggtttcggcggagtctgacgccatgaaagccgagctcgtcgagcgcgttgctgcgctcgaaacgaaggctgcgtccgaggagcagaagaggcaggcggccgaagccgacatcgactcgcaaacccgggacctgactggcttgagggctgatctgggcgctgccaaagccgcgaccgaggaggcacatcaactcctcgcctccaaggccgaagaggccgccgcggctctggcctccgctatggccgcccaggagtccaagcacgccgctcaggttatcgagcttcgctcgcaactcgccgacctgtcctccatctacgaaactgcactcggagccgagaagtctcggtcggcagggtcgcaagacgaggcggcccagcgcgtgcgcgctctcgaggagatgcgcgaggcagaggcgacgtcacaccaagctcgcctggacgaactcgaggcggccgtcaaagccgctgagacgaaggccgaggagcactcggcgtcggccgatacgaatcactcggaagtggccgcccagcggcttcgtatcgccgaccttgagactcagctggtcgatgtcgaagcggccgctcagcgcgaccgagaggagaaggagactgcttcggccgccgaggccgtctccctgcggacccgcatcaccaagctggaagccaatgtttcggacatcgacgaggctgccaaggagagttcccgggctctggtcgagtcgcactcggccgctctggccgcatcgacggctcgcatcgccgaccttgaactcgaggcgtcggttgcgaaggaggcggccaacgcgcgtgagctcgagtcgaccgagtcgcacacggccgctctgtccgtctcgcaagcgcgcatcgacgagctggaagcgaaggtggacgaggtcgagcagtcgactagggcgaccgaggaggcgtcccgcacgtcgcatgcggccgccctcgctgcttccgacttgcgcatcgaagagatggaggcaaagttcgctgcggccgaggagaccgctcggagacaagccgagacggacgcttctcaagccaccgtcaccgctgcgcttcaagatcgagtccaagctctggagtcgcaagtcgccgacgccgccgcatccgctgcgaaggagcgggcggccgccgaggatgctcacgtttcggtggctgctttccttcaaggccggatcaacaccctcgaggcagagctcaccgaggcatcgactgcggtcgagaagcagcggtcctctctcgaagatgcgcatctcgcgacgacgacggcgatccaagcccgcatctctgacctggagacgaagctggctgcggctggcgatgctcttgccgagcagcaggccaagctcgaagaggagcacactcgcagcatcgccaacctcgaggctcgactcgccgaggaccatggatccgcgctcaaactcgcactcgaggacggctcggtaatcctcgccgcccagactgccgcccacgaagccgagcgcgcagccttgcactcgcgtctcgtcgggctcgaggacggagccaaggcctcagaagaggctcacgctagcgagcttgccgctctccaagcccggctcgtcgaggatcacgaatcggcgctcctcagcatgcgagaggacggcgcggcggctctcgccctccagaccgagtctcacgcttccgaaagcgccgcgctgctgtctcgggtcgccgagctcgaggacacgatcaaggcctctgccgcagaggcagcgtcgcagcaggaggatctgtcggcgttacacgccgctgagcttgctgccctccaagtcaagctcgcggaagccgagagcgagcgcctggctgccctcgccacttccatcccgctggccacccacgactctgaggttgcaggcctcgccgcccggatcgccgagctcgaaatatcggccgccgacgagcggatggcgcacgagcagtcattgctcgacgtccgctcggccgctgatgctgcttccgacgcacttcggaccgagtcggacgatgcgatgcgggcggctctcgtcgagcaggccaccttactccaaaggcttcaccagacggagctcgacgcactcatcgtccgcaacaccgagatggaggcctcaacggccgctcacgacggcacgatgcagcaagcgctcgtcgacgccagccaccagcacgacctggcgatcgaggagcagcagcaagctctcgccgcgaccgtcgaggctgctcggaccgagacggctgctgcgcttgaagcgacgcatcggtcggccgtcaacgccatcgagacagaggtggccgacttgaagtcagaactcgcaggcttgcgcgccgaccgtcaggccgaactcgacgacctacgggccgcccacacccgactcgccaatatcgagaccatctttgacgcccttgcggccgagaaggctgcggtcgagtcgcgtttggccgaagtgacggtcaagctgggcgaccaggcgcacctcctgtctgcgtcggccgaggaccttgaggccgagcgccgagccgcccaacttgccaacgatacggcacaggaggccgcaagcgcgctcgcggccaagacggacgagctccaggttgtcctcgacgagaaggctgtactggtcgcagaacagacggccgctgctgccgatcgtgccgccgcctcgccccagtggatgggcatgaccaagtcgccgtccatcgcagagggcctcaatctcgcacatactggctcccttcgcgagacgcgccgccccggtcacagccacaacctctcgtacgctgagccaagccgcatgctgcccgccgggacgcctcaggacgaggagatctcgaagcgtgcgttacggggtgccgcctcctacgacggccatggaactgacgaagctcgcctgactcattgcagtcaaccagacgatcaaaattcagcgcgacctgattgtggacctgcaggacaaggtccggatctggggcgaggtgcgcatctacctgcgcgcaagctcgacgagccactgcttactagtccttctctctcgctttacagcaagcgcgcaagaacgaccgcgttatcaacgagctccacgacgagatccggtctggccgcgtgcccaacgtccaggctctcagcagcaagtggtctcagagcccaacgcaggcaccgcagtcgccttgggagtcgctgcacaagtgctcgacgcacaccgctccgagcgcagcgccggtcactccctctcgcccggcccactcttcgcttcgtcactcggccctcgccgaatcttctcagtcgaatcaggcctcgcccaggacgcccgtccagacgccaagcacgccaaaacgtcaccccgtcaagacttatgtcccaagcgcggagaagccgccgccgctgccgcacgcgtcgcatcagcactcgaattcggccgctcgcgctgcccggcgagtgaccatcgagcacgacatcaacgcgctcaagggtgcgttcgctgatcagcaagtcgtctggccctctgactcgcgctgacactcttacttcccctgctgcagccacgtccaaggtcgagcagagccgcagtgttttcgactcgccagtcaggacaccgacatcaaagacgactcgggaactgtaaaccgactttctcacaacccccctctttcttcgtctttgtccctcatctcgattttgtcgaccactgcacgatctttacgacctacttcttctgggcaagcaggtcgagagggagccgaatgtcgaagccgggcgagcttacctgccagcacaaaggtgaccgcttgaagcgaagaagctgaacgagacacgtgtcgagagtgacgacctgcttttccgacggcgatatgctctgccgccacttctgctcggcccgccgctcgttcgcccccgcgtcgggccggtcgaagcgctcccattcgagccggcgtcgaaacgcgctatccatcagcgccatcagtggcgctgccggtgccggtagcggacgagaagccctcgagggagctgatgagcagctgttgggtgcggtcagcttcggctgaagcgtgacggggagagagggtgaaggacaaatcagcagctgtctcgcttgagcaccgaaacagcgagaagaccgatcggctgtcaaggatgctagagccagggtctgggacggtcagcagtgcggcacgagcaggagaggggtacagcccaggtcagcttcggtacgctctgcggtcggcggggttagcgagctaagtctagcacaacaatgaatgagaaagatgtcagcacagccggtcagaggccggctgattagcctagtgagggctgctgaggtagacgcgagcaagaaagcagagagcaggtcgagcaggagggcgaggccgggaggaggcctgcgaaatggcaggcggcgactggcccgcgaccggcgccgcaacgacccagccgacccagagctgctttcgaatagtccagctgcgtgcctgttagcatccttgaaggccgcgagagctgtgtggaacgaggtagggtgcgagagagagatgtggtcgggagagcggaggcggagcagcgcgctgcaggctctctgtttggcaggctggaagtgctcaaaggtgcgctgcctgcccgccagtcgcggccctcgcagcagatcagcttgctccaacccgttggccttcctgccaatctcacgcgcgagcgttgagagggataagatgcatacaatgagttaagccatcatgccagcgatcgtggcggtctggcaggtcgacaggaagccgaagatgagcgccgagggcccgatgaccgagataatctttgcccgagacggggcgagacccgagatgacaccgatttggatgcctagactgcccatgtttgcgacttggatcgtcggggggaggggggcgtcgtcagtgtcgtccaaacagggcagatgaggctcgaaagaagaaggacgcacagccgcaaagcgagtatgtcgagacgaggtagccacgggcggtcatgttcgctgtggaggaggatgacggtcagccactcgctcgcgttgacagaaggcagcccagactgacctcggccgatagactgaagctcgcggtaggcgacaaactcgttgccgaagagcttgaggccgagcaggcggccggtgatcaggagatcctgctttgggacgcccatgagccatgcgagcgggtaaaatatgtattggaagatgagcctgcaagatgtcgagtccgtcagcggcagtaagactccggattgtcagcggcggagtactcactcgagtgtaaagttctcgatgttccaggccttgccgacccaggtcaggacgctgaggcaaagagcggcaaagtcagctacagcctttgacaaggaaggcgtgacgtggggcgcacccgtcaatgacgtagaggagcgcgaggacgacaaggacgttgcagaggataaggccggcaaccttgaggccgaaccaagcgccgttggagaaggcgtgcagcaggttgccctcttcggcgttgtcctcggcgccgcggtcgacgacgacgcggccgagagtgatgggcacctcatcctctgggtagacgatcttggagatcgcgatcgaggccgggatggacatgacggaggccgtgatgagcgactcgggcgggacgccgagcaggatgtagccactgaggaccgagccagagatcgtcgagaagcctgagcacatggcgaggtggatctcggacggcgtcatcaggtcaacaaagggcttgacgaggcacgcgctctcgccctggccaatgaacggcgaggcggcagcgatgacggctgaaaagggcggggagaaatgaccgtcagcgcgagagccagatcgttaagcagagcagagcgagctcaccctcagctccagagatattcatggtctgtgaaaagtagggcgggcagaatgtcagcgagagagctgtcgaggctcgtgccgatgaatgcgcaccttgaagaagagccagctgaagccctggatgacccaggtcatggcgccgaggtagaacatctgcggtcgtacgggtgcgcggatcagcagtggccggcattgcgagacggggggagggccgacacaccatctggacgaaggcgatgaagaagatgacggcgccgagcgttccaaagaggaaccaggccgtgtacgtcgggtcgttgccgctaaagaaggtcgcggcgagaccgccctggtggagaaagtcggccgcggcgttggcgatccacttgaagaggctgaagccggcgccgctcttgaggacgaagagggcgatgctctgctggaagatgaggccaacgatgaccgtgttccactggatgagcttgcggttgcgtgagcagagccagtaaatgatgttgaagcagagcaggctgtcggcggcggcaagggggactgtttagcagaccttcgacaagggaacgcgctgggagggttcgactcacccaaaaattgagatcgtgcggtcgccgtaggtcgtgccctctggcaggtcaaagccgtaagccgaaccgaagatgagggcgaacagggcaagccaaccgccgatgaaacgggccacgcgcgggagcttgaagaatggcgtttggacgcaggcgccccagacacggccgacaggccggctgacgaccgaggatggcacaaagcggaagctgaggcgaagaggggtgatgcagcacgaagccgcaagtcagcgggaaggtcgattggctagtgcccaggcgaggccgacgcacagcacgatgaggacgatgaaccaggcgatgacggctgaacgaagaaggcgagctgggtcagtcgaacgaaggcattcgtcagaggcgacggcctgttctcactcgactggatccagctggcggtaggatgaagggaaaggtcagcgcgcagtcggcctacctccgcagctcaggcaagacggaccggtgtcgagtcttgacgttccagaccgaggatgcccaccctggtgaccggggtgtcgaagaagacctgtcagcggagacgctcgcaagcctccctgccaagtcgacgcacaggcgatgacgagcgcggcccaagccgggaggagcacgtagcgcgccttggcccaggtcagatgcctgaggtacttctgcttcctggtctgtgagcaaggttgacgaccgacggggtcagctccgaccatgtcaagcccgacctcgcgagtaggctccggcgacagccgaaaggggcttcggacgtacgatcgcctcgtcctttgcgacctcgtggtcgaggacggccgcgctctgctcgtgcattttgtcgagcgagctctgaggctcggacgaggtcgcagttcggccgtcggacgttgggtcgtcaaacgacggcggcaggctcgtctgctgctggcgctcgaggtcggtcgagggcgacctggaggcggcggccgtgctgccggcgatcttctcgacgtcgtcctgcaggtcggcggcggcggcggcgggggacatcatgacggtggaatggtcgaaggcagctctgctcgctcgggcggcaaggtcgggaggagctgagggtgcttgctgcgagagggggtgaagaaggacggcttgcttgctggacttcgaggtcggtcggaggggaggcgctcgctctcactggagctgcaggctcgcccaaaaaatcagaagaggggccgacggtcagcaagacgccgtcgcccggccgtccccgaccttcggcggcgggtaaggtcaaatccggacacgcagccggggtgtcagaggagctcgtctggcgtctcccggaggaggagcgacgggcgagcggcggcctcttcctcccggctcgggtccttgccagccgaacttccctccagatgtcagctggccagcagccctactcaatgcgctcggccctgagcccagcagccagcaagagttattgccggtgagcctaccgaaggaagaagctggcgacgtcgggttgcggagaaggagtcggagcgcccggagaacgagtgcggaggaccagcctgccgcgcgagagggaattggcgacgacgaccggttgctgccttgcagctgggcgaggctcacagctcgcagcttcctcctttccttctgaaggcctaagacttgagagctgctaagagcggcaagaggctgtgcactgtgctcgtagcgtgctgtcctggcgctgaagctgtccgtattgagccgtcgttccgaagcgtggcgacttgcggtcgtcgggcaggcgcagcagcacgtcactcggaggatgactgcgatcgacgaggcgcccaggccatgcgagcagaagggagagaaggccgagtagcccgtactggacgaagggaggccatggcagacggcggtgaggtacgtctgctcgcgacgagttgctacctgggctgctcgctgctcgggccgtctgctggggcctgtcgcttccttctcgcgggaggcgacggcttcaaacccgcaaggcgacgcaaaggtccccacggccagcggcgcttgcggcctccggctcgcgccagcatgtgcggcccaggcgctgcaacgggcaggcgacaggcaaaagtgagagcaagacaaggagaccttgacactcaggagcctgctgccccttgtgtcgacagactgttcgatgctgcgaaagaagtcgcccggccgcagccggcgtgcgacgtcggggttcgggcgactgggagagcgaagacgggcgccgcggcggggcgcgcagacctttgccctgtcgacgacagccagccccctttgcccttgccgacgaccagctcagccctaccccttcgcgcatctcaagcccgctctcttcgatgtgaacaggccaacgctcgctgcaaccatggcctcgtcctgctccagccgctcctctccggcctacgccatgccggcctcgtcggcatcggccagcaccgccgccgctcacgcccaccgctcgccagccggcggcagcagcaccagtaccagcaccagctcgctcctcgtccggacgacggcggccgcatcccatccgcggtcgtccgcctcgtcgtcgtcgtcactcgcctacggcggtcaggctctgcccatgagcccgtccaagcgcaaggtcgagggcggcacggggatcgacgagcgtcttggccgaggcgagaagaagcttcgggaggacaaaggcaaggggcgcgcggtcgccaacgaggacgcacggtcgcatcaaccgtcgcgccgccctgcgaaagctgctgctcgagctcagagcgcagggcagccgtctgccgtcgagtcagcagggctgtcgagcttgccggacgggcgcccgccgggcgtcgtcgtcaaggagctgccgcatgactacattgcggccgacgccgaggacctcatcctcctcatcggtacgtctcgtcttctgcgcctcgcactgctctcggctcgctcgaggcctcgaatactgacccatctcatgcgctcgtcctgtccgccttcagcgtcgatgctcacaaagctcatcggccacaatgaccaggtgccgctgcgaccgtgcgtgctacctaaactctcgagctctcgctccggcttggcactgaccctgctgccacgcgaccgccgctcaaccttccagagaggacctcacgcgcttccactcgcgctctccgccgggcatctctgtcgtcgactacctgcgccgtatcgtccgctacaccaatatcgaggtgcgcagctcctccctttgatgaatcgaacgtttccggcggcgagctcttcagctgatttcgacgatgctcgccagaaatcgcccctcttgatcctcctgccctatctcgacgccttctgcgcccacctgccgaccttcacgctctcgtccttgacggtccaccgcttcctcatctcgtcggcctgcgtcgccagcaaggccatctgcgactcgttctgcacaaactcgcactacgccaaggtcggcggcatcaaggtcgacgagcttaacttgctcgagcgcgagctcatctctggcctcggctggaagctcaacgtgcgtccagagagctcagctgcttggcttcagcgaggtgctgacgtcccttacccatcgcccctcaccagtgcgaggcctcgctcctccagtcgtactacacctcgctcatcacctcgtactcgacgccccaagttgcgcctccggcaggcgcggacggcgcgccgccgccccttccaccgcagacgatctacactcaggccccgcccaacccgccaccgccgccacgagcaccaccaccctacctgccatggccgtcgctcgagagcctcgagggcagagggccgtgacttgtcgagctggagagccttgcgcgagcgaccgctccgttcgacgaggctgcggctcgtccgtcccgcggcgagctcagcacgataaaaagacccggcgcgaaccgctcacgggagtcggttcgacgccgggtttgcagaggacgtcaggcgcctcgacccaggcgctgtccactttccaagagaaggtcgacctcccacaccggtaggagaggagagcgggagacgaggatgcggtagaggagacggaggtgtagcagagaagagaggtatgagggtagcgcaggtggagagagaggaggaagagttggaggaggagggggccgcaaggggagaagggaaggagagcgacagaggaggcgcggcgaagggagacgggcgaggcgcgcgtcgagatgggcgcgttccccaaatcgggtgatgcaaaatcccatttcgcccaaacggtgcgctctcaaggccagccagcagctcgccccaccagcctccttccgtcgacctcaacccatcccctcccttcctcttccgcccgcatccatcgcccttcatctcgcggcaggtcccgggagagagagagaggcccagcactcgccacccccttctccctccatggccaccgatcgccgcccgctggcggccgacgcgtcggccggaccgcctcctggcgcgagctcagcctcctcctcgaagcagcagccggcggcagcggcgcctctgacgacggcagccgccacgggagcagcagcagcagctcctgccacgtcggctagctcgacctcggtacccgtctcgacaccgacgcccggcggctctggcggcggcagcggaggagctggaccggccgggccgagcgcggtcagcgtcgccgactgcgagggcttcgccgcccggctaatggatcccaagagcggttcgtcctgcccttgcttcttgttcgagctgctctcgtcctcaagcgctccacggcacaggagcagccgctgtgcccgttgcatcaagctgacactcagctgttcctctcggtcgtgtcctccgcgcgtgcctcgcgttgatcgccctcgctagatgtcaaggttaaggtgcggaccggctccctctcggctcgtagcagcatacgatatctctgactgaccttcattgatcttccggcctccttaccctcgctcctacctgcagctcgccattgccaccgacctccgcgagtcggtcgaccagttccgggacgtcgactacgctcgctacctctcgctccttctgccagccttcaccaagattctgcgcgagtcgccgccggtctttgacccggtcgagcaggaccagcagaagctccggcacatgctgctcgagatcatccagcgcctgccgcacaacgagagcctgcggagctgggccgacggcattatgagcctcatgctctggctcctccgagtcgagaatgaggacaatggcgtcgtctgcatcaagatcatcatcgaccacaaccggacgttcaaggaggaggtcgagtcgcacgtcaagacgtttctcgagctcgtcaaggagatgtacggcaacctgcgggcggtcgtcaagcaggcgtttggcatcgagggcgagctcccgccgacgccgtcggcctcggaggacaacgccaaggtccggagaccgagtctaaagagcttcaaggtgctcacagagtgtccgatcgccgtcgtcctcgtcttccagacctggcggcagattgtcttcccctacatcaaagactacttcccgctcgtcatggaggtcggtcgctccggctgaaccgcagagtcgctcgtcctgttgctgacgtacgtttgctcgcgcacgcagtgcctgacgctccaagctgagccccagcgccgagcctatgctgaggcggccgagcgtggcgagacctttgtcggcgtctcggacggcatcaagaaccgcgagttctaccaagagttcatcatcgcccaggtcaaagtacgtggttgactgtaccccgtccccgtcgtccgctgccatcgactgacgcttgaccaacgcccccgaccagactatgtctttcctcgcctacgttctgcgaaccgcgactgaggacatccggaagcacgctgagacgatggccgaggcgagcattcggctcctgcgagactgcccgcccgaggctgtcgccagtcgcaaggtccgtcatcccgtctgctcccctcctgcctccactcgctgaccctccgccgtctcactccttgcaggaactgctcgtcgccacccggcacatcctttcgaccgactttcgggcgatgtttgtctcgcagatcgacatcatgctcgacgagcgcgtcctcgtcggcaccggcatcacctcgcaggaggcgctccggccgctcgcctactcgatgctggccgacctcgtccatcacgtccggaacgagctcacgatcccgcagctcacgcgcgtcgtccacatctacagctgctgcctgcacgagccggccttcacgttcggcatccagacgatgtgcgccaagctgcttctcaacctgatcgagaccatctgctccaagacggacaaggttgaggcgcccaagttcctgatggccatcctcgagtgctgcgtcgataaactcggcgcgattgacacgatccacgatcagctcaagggcgtatacggcaaggaggcggtcgaacgccgccgggccaagggcaaggcccgcgcggctgacggcaaggaggcgaccgtcgctgggaaggacgacaagaagccagcttccactggtgtagcggcggcggccgccaagaaggacgagccgacgccggcgctcgagctcgaggaccagccggcatggctgacgatcgagcgcgccaagccggtccacgctgtcgcatttgcgtcggacggctcggatgcggcctacagcaaggacctgtacttccttgtcgacgtccgctacctgatcaagacgctcctgcacggcatccgggcgcttctcaaccagctccgcgtcctcggtgcctcgccgccgtcgggccagctgctcggccggctgtttgagtccgagtcacgcctgcttgccttctacgacccggtcaaggactcgcgcgacgagaaggaggcgctcgacctctttgtccagatcctcctccactttgacaaccacgtcttccaggaggtctggacgacgcgcatggacttcttcgtccagcaggcgctcggcaacggccacatcctcaccatcccccagtcgctgctcgtcccgcagaaccagcagatcccccacctccaggacgtttcgcatcagctcgtcgcgatcctcctcaagtacctgatggcccgactcgagtcgtttggcgagcaggacaagaagaacagcgccctcacgctcaagctcttcaagctcgcgttcatggccgtcaactcgttccctgagcacaacgaggccgtccttgtcccgcacctcgccaagctcatcaccgactcgttctcgtttgcggcccgggcgaccgagccgaccatctactacgcgatcctccgcgccctcttccgctcgatcggcggcggccgattcgaggccctctacaaagaggtcctgccgatcctccaggagatgctcgacacgctcaactacctcctcctccacgccgagccggaccggcgcgacctctttgtcgaactctgcctgacggtccccgtccggctgaccaacctcctgccgcacctcggctacctgatgaagccgctcgtgcacgcgctccgggccggacccgagctcgttagccagggcctgcggacgctcgagctctgcatcgacaaccttacgtccgagttcctcgatccaacgctcggcccagtcctccgtgacttgatgggcgccctccatgacctgctcaagccggtgccattcaatcacatgcacgcccatgcgaccgtgaagattctcggcaagctcggcggccggaaccggcgcttccaggcggtcccccacctgctcgagtacagcccgcctgcgcccgaggctgtcgtcccgctcagcctcgacggccaccagcgcaagctcgcgatcgcgcccttgaccgagctcgccctcaagtcgatccgcctgccgaacgagtactaccgcacgcaggcgttcgactacctccagaagtcggtgctcgtctttgtcgaccaggttcgtctctttctcggccgaagactgggcgctgctgctgctagtgttaacccccttgcgtctgccttttgtttgctgcagggcggtgttctcggtgccgagcaagaaaccgtcttccagcagacgattcagggtctctttcacgccgcgcaccatgccgagctcaaggagccgacgctcgccttcatccgcaagctgtcgcgacacatctttactccggagccgcgcaaggaccagacgccggccgactcgtcgtcccgccacgggcgcgagcgcatggcctcggtcgtctcaccgctcgtcggcgcctaccttgaggcaatcgcacttgcactcgccgccctgccagcggtcgaggccgccggcggcaaggggatcatctcgctcattgtcgacgacatcctcggtcaggtcgacaagacgctgccggtcgaggagcggcccgacccgtctggcatgctcgacgcgctcggcatccggctctcggcgctctgcttcgaggagccctggaaccgcaagctggctggctgcaccggcctctcggtcctgacgtctaaggccgaggttgaacaccagtggatcgtcgaccggcagctcgactttctccggccgctcctcttcatcctcaaggatatgccgaatgacccgcctcggacggtcggtttcgtcgtgacgacgatcaagcacatcatccgcacgtgcaacacggccccggcggacggcccgccgccaacgaccgcgccgcaacggcaaaagttcatccaggtgctcatcaaggaactcgcaagcacaaacgccgtcgtccgcgacacggtccaggcgtgcatcgaactgctgtcggagctgacggacacctcggtccacgacctgctcgcgccggtcaaagcccagctgctcacgcccatctttgacaagccgctccgggcgctgccgtttgcgatgcagatcggcaacatcgaggccatcacctactgcctcaacctgcggccctcgatcccagaagtcaacgaggagctcatccggctcctgcacgaggttattgcgctcgccgacgccgacgaccaggcgcttatcggccgggccgctcagcaccggcacgaggtcagcctcaagagccttcgcatctcgtgcctcaagctcctgtcggccgccatggcatgcaccgacttcttcgccaagcagaaccaggcccgctcgaggtgcgtctcccgctgtaagcgcgtcgaccgccagcctgctgaccctccccttccgctcctagggtcatcgccgtctacttcaagcacgtctactcgccgacgaaggagatcatgagcgtcgcccatgagggcctcaagctcgtgctcgcccaccagaacaagctgccgaaggagatcctccagtctggtcttcggccgatcctcgtcaacctcgccgacgccaagcggctgtcggtctcaggccttgagggccttgcgcgcttcctcgagctgctcaccaactacttcaaggttgaaatcggtcacaagctgctcgaccacttcaagacgctttccgaggagcccggcatgctcaccaacgccgccttcagcccgctcgacgacaaccaagacattgcgcgcatggtccggctcatcaacgtcttccggcttctgccgccgacggccaacatgtttctcaagacgctgacgacgctcgtcgtcgatgccgagacgaacctgcaccagtcggccccgggccccttcaccgagaacctcgcgcgctaccttaaccggtataagacggacgccgtcccctacctgtttgagaacctgcggaattctgacatggtccggacgttccgcaacgtgctcgcatccggctttgcacccgactttgccgacgagctctcgctcgaggccggcaggctcggcgaggtctgctttctcgacgcgaccgcccaggacctcgtcacgccgggtctgctcatcgtccgtgagctcatcagccacgacagcaagtggctcgtcgcccggccaacggtcctcgactcactcgtctcgctctggcgggcgtcgcccgctcggctcttgcctaggggcgacggcggggcaccctcggcgagccagcgcgagccgctcctgatcgtcgaaatcttcctgagctacctcaagtttgagccgcacatcccgctcatctttgacgtcgtcaagatctacacgatgggcactaactcggacctgtcgggcgtcacgcgcttcctctacgaccacgtcgccaaccaccagtcgacgacgctcaagaaggacgtcctcaaccactttctcggcgtctttggcgaccccaatgtctcgtggcccttcaagatgcactgcctgcgcctgctcgtcaacccaatcctcgtcgtctacttctcctcggccgccagccattcgaacgagctcatcgacgctcagttcgcggcgagcgcccacatgctcatctggcagaagattgtcgccgacgacaaggcctcgaccggcggcgaaaaggccaaggccgacggcaacccgatctcggccggcggcgacgcgctcaagattgagctcctccagatgtcgacccttctcgttcgccactgctccgaggtcctgagcgaggttcgcaaggacatcatcaagacgggctggctctacattcgcgacccggacccaacggtcaagcacacggcctacctgctgatcgcccgcttcatcgaaaacaacgagtgcccgaccaatatcgtcatgcaggtctggtcgggcctgctcaagctctcgccgtctgagggccgtgcgctcgtccgccaggcaatcgacatcatcgcgccggtacgttcgacgtccaatctcgctcaatgctcgtgctgaagcgttacgctctcttccaggtcttgccccagcgtgtccagaagtctggaaacggccctccgccgtgggccgtcgtcgtccgcaagacgctcatcgaggagggccacagcacgccgcagctcctcatcatctttgagctcatcgtcacccactcggacctcttctacgagagccgcgacctcttcgttccccagatggtcaacgccttgccccggctgggatcggcgccggccgcgactgccgaaatgaagaaggttggttctggcgtgagggaaacaggaggatgtccactcgacggtcgctgaccagcccttctctgcccctctcgtcgcagctgagcatcgacattgtcgagctcgtcctcaagtgggaccggcgccggaccggctctggccacagccgcgaggagaacgagtctggcaagcggtcggccgatggcgatttgccgtcgccgaagcgtgcgcgcgttgaccgcgctggcacggccgtatcgacttcgagcgccggcggctgggctcctccgcccgctctgcgtgagagcatcgtcagctacctcgtccgcttcgtcgccatgtcgcacgagccgatcgccctcggcgggctctgctcgcgcgcattcgagctgctcaaggacctgctcggcccgacaccgtggtcgccggcatcggtcaagctcatcttcttccagcggaccctgattacagtgcgcccctcgcgctttcgctaaatcctcttgatcgattgactgacttgcgccttcgtcctttccaggccgagttgaccgagcagaacctggccttcatcaacaactctgcccaggtgctcgcgctcgtcacctcaagcaagcccgacctcttctttacgtcgcagatcaacctgctgcagaagctcatcgagaagagcgtgacgagcgacgagacgagcctgcacgacagcctccggccgatcttgcagcgcatgtttgaggttctccccccgccctcggaggacgccgacaagcccgaggtcgctgagctccaagccttccaggagtgggcggaaaacgtcattggcgagggactcaagggcgccggtaccctgcgtggaccgctatttgtcctccagtgctggaccaagacgcggccagacaagatcgagacggtctttgcggccccgcttgtcaagatcctcaacaagctgtgcaaggagcacatcaacctcgccccgctcctctcgcaccagtcgttcccgccggcggccgaggccgcgatcgacaccatcatctccatccttgacctttgtcgcgtgcgcgtccaggacctcaaggaccagcgccggtggctcctgagtgcgctcgttcagcttattgagaagtcgccgagcgtccggctctgccgcttcctgctcggcatgatgcgcgactgggtcatggacccgcaggaggcggttccgacgcacaaggagaaggccggcctcctcctcaaaatgcaggcattcgagaagcgcgacgaccagaagctcctgagcgacttcctccgtctcatctacgacgtttatcaggagccatcgctcaggcggaccgacttgacgttccggctcgagccggccttcctgctcggcacgcggacgagcgacccagagctccggagtcgctttatcgacctgttcgactcgaacctgccgtcgtcgctgtcgggccggctccagtatgtgctggcaagccagagctgggagtcgctctcgagcggctactggattcaccaggcgctcgacctgcttctcggctgcgcccggtcgaacgagccgctcttcccgcactttgtcgccgctgccgccggctcggccgacgattccgagacgctccagtacatgatgcgcgaggccaagagctccgacattctcctgccgagccggcggctgctccacacgagcgccgaaatcacacaccgcgtctggatctcggtcttcaagctgacgtggtcgacgctgtcgcgctcgcagcagtcggacgcgacgcggcaccttgtcgcgctactcgccaaggagcaccacctcaaccaggtcgacatgcggccgaacgttgttcagacggtgctcgacggcgtgctcgcctgcagcccgcccgttgtcctgccgccgttcgtcgtcaagtacctcggtaagacgtttgactcgtggcacacggcgctcgagctcatgaacaactcgctctcgctcgagcccgtccggtccgatgagggtctccgcgaggacacgcgcgacggcctcgccgagctctacgccgacctctgcgaggacgacctcttttacggcctctggcgccggcggtcaatttaccaggagaccaacgccgccctctcgcacgagcagaacggcatgtggaacctctcgcaggtcatgtacgaggccgcccagatcaaggcccggaccggcgtcctgccgttcaccgagcaggagtattgcctctgggaggaccactggatcacctcggcccagaagctccagcagtgggacatcctgaccgacctcgcccgggccgagaacaaccacgacctcctgctcgagtgcgcctggcggctctcggactggggttcagtcgaccgcgagacgatcgagtcgacgctagcggccgtctcggacgttgcgacgccccggcgcaaggtctttgaggcctacacgtgcctcatcaaggcccagggtagcctcgagcggtcgtccgagttttcgcggacgcttgacgacgccttccagctctcgatccgcaagtgggtctcgctcccaaaggcggtcacgatggcccacgtcccgctcctccagctcttccagcagtttgtcgagctccaggaagcccaatcggtcttcgagagcctcgcccaaacaaacgcagccaacctcgagaaccgcgtcacggtcgacctcaagggcatctttacgacctggcgcgagcggctgcccaacttttgggacgacatcagcgtctggtccgacctgcttgcctggcgccagcacgtcttctcggctgtcaccaaggtctatgtcccgctcatcccgcagggcgagacggcgacgcacggctaccgcggctaccacgagacggcctggatgatcaatcgctttggccacgtcgcgcgcaagcaccagctgcacgaggtctgcagcaacgccctcaacaagatttacgcgctgcccaacatcgaaatatccgaggcattcctcaagctccgcgagcaggccatgtgccactaccagaagcccgaccggctcgccgagggcctcgagtcgatcagcacgaccaacttgatgtactttgcgccggcgcaaaaggccgagttcctgacgctcaagggcatgtttatcgccaagcttggccacggcgaggacgccaatcatgcgtttgcgcaggccgtccagatggacctcaacctacccaaggcctgggccgagtggggccgctacaacgaccagatcttcaaggagaagccgaccgaggtctcgtgcgcgtccaacgccgtctcgtgctacctccaggcggccggcctctacaagagccgcaagacgcgcaagctcctcgtccgcgtcctctggctgctctcgctcgacgacgccagcaacctcatctcgcgagcgttcgagacctacaagggggaaatgccgacctggtactggatctcgctcgtgccgcagctgctgctgtcgctctcgcaccgcgaggcccggcacgcccgggccgtcctcatgaagatcgccaagtcgtacccgcaggtgcgtccggctctccactaccacgcactgccttcgctgaccaggcccggcgccctcctcctcccaggccctcttctaccagctccggacgtctaaggaggaatttagtgtcatcaagcgtcagcaccagaagcacctccagaacctcgccgcacgcgatgccgcccaaaagcgggccgcggccgctgctgctgctgccgccgcgggtcctgctgccgcgaccgacgacccaatgacgggcggcgccgctccggcctccgtgccgacgcctgccgtcccgaccggcgccgcgcctgatgcagcgacgaccgccgagaagccgccggcggtgacgacgactcttgcggctcctgccggagcagtcggcaccccacccgtgcctgcgccgccgacagtcatcccgcccccccccgggaccgagagcgcgaccggctcgacgacgccgggcgtcccgccgacggcgcagccgactccgacgcctccgggcccgcgccagccgtgggagctcgtcgaggagattctcaacatcctcaagacggcattcccgctcctggcgctgtcgatggagaagatggtcgaccagatcaacagccgaggcaagccgccccaagaggaggacatctaccgcttcctttcggccctcctgctcgacggcacccaggtgcgtctggccttgcccccaaccctcgctgcttcaatcgtgctgacctccttaatctgttggcagcaatacatcacgcggagcgacaagcccaacgaggacgaccgacttgggtccggcacgcgcgacagcctgctccacttcacctcgcagtccaatatctcgccccagctcaagaagacggtcgaggaggacctgctcgccgagacgtcgctcaaaaactaccttgtcaagcttcagcgctggcgtgacaagtacgagagctcgctcgatcgccggccgcgcaagcaggcgctcgaccagggcggctgctacttgaccgagttccaccacggcaagttcgacgagatcgaggtccccggccagtaccttcaggtccgtttcgcgcttctcagcgacccgcctgttcgcccgcaaaagactgatgacgtcttcttcttgcagcatgtcgacaataacaacgattttgcgaagattgcccgtttctcgccgacggtcgagctcggccgcggccacggcttctgcttccggcgcatcacaatgattggccacaatggcagccagcatgccttcatcgtccagctgccggccctccggcacacccggcgcgaggaccgcatcagtcaggtcttccggacgctgtcgacggtcctccagagccgcaaggagtcgcgcaagcgcaacctgtcgttccacctgccggccgcgatcccgctcgcaccccagctgcggctgctcgagctcgacaactcgtacacgtcgctccaggacgtctatgacgcccactgccaggagcgccatctgtcaaaagaggaccctgtgctagcgtttacgaaccggttcaagagcctcttcgaccctaagacgcaggcggttggctcgccagaatacatcaacctccgggtcgagctcatggacgagatcgagacgaaatacgtccccaagacggtcctcagcgacgtgggtcctgctcggattatttctggcagagtcctctcggctgacgtaggcttccctctcttcgcacagtacatgattcgcctgatgaagacgccgaccgacctcttcctcatgcgcaagcagtttacgctgcagatggcctcggtcaccttcatcacctacgtcgcctgtcttcagcagcggacgctcccgcgcttccagttctcgcggacgaccggcatgatctacatgagcgagctcctgccgtgtacgtctttcccctctgctcgctcccgtcgactcggcagctgacaccttcaccccctccctcccgcagccttctcgcacaaccaggaccccgagcgggcgtcgctcctgcagaacgacgatccggtcgacttccggctgacgcccaacctccagcactttatgacgccgaccggcatcgagggcgtcctcacggcatcgctcgtcgcgatcgctcgcggcctctgcccgccagaggtgcgtctctaccacgaaagctcttctcatcttgggcattcggctgacacgtgccctcttaaccgacgatcctgcgaacagtttgaacttgaggagcagctcccgctcttcatcaaggacgaggtctaccacatgtcgaacgtcctccagcggcggccgctcgacgacctcggcttccggcagctgatcgccgacaacgtcgacgtctttgtcaaccgggtcaaggtcatgtcatgccagtatgagcgcgagcgggtcagtccaagccgtccttcgaatcttggccggcagagtgctgaccttgcgcctgtcccctcctccgtcgcagcagaacaagggggacgtccctgtcgcccagtcggtcatcagcctcatcaacaaggccaccaaccggcacaatctcgcccgcctgtccgaggcttgggtgccgttcttctagagacgcccttcgccccgtcttcctttcctctctcacgcctatcttgtaacacttcccccgcacgcttgcacgcccccttcctctctctttcttctcttgtaacgacactctcctcgtagccctatgtaatgcggtccaccctcagtcagaacctttgcgcagatagaactggtatgcctccccagtcctgccagcccgtgcagccctcagctcgagccgccgaggcggcaggtgtgccagattgttaaaccggcccttacgaacggcttccagaggcaagatccggccgttagagtgacccccgatcagggttctgtagacgcccatgcgtctggggtttctagcagccgcctcccgcgcgcgcgccgcctgggctgggcttgcgcctgcgcgctcgttgctgccctgcctgctgctcgtctccgccgccgcctccgcttcccgacccagctcagcaccctcaagacgcaaagtaagccctagccctgccctatccagcaccagcaccagcaccagcaccagcatcagcagcgcacagcacacgtccgttgccagcacctactacgccgtcgtgcggcacgtcgtagcggacccgtagcctctgtcgtccgggagctcaaacttgctcaggcgggcggagcgagctcggtggtccaggcctgagggcgaggcttgcccgacggaggcacgaaccctcgcctcggcacctggcagctctgcgcgtgctccatggagagagctcaactcttcttccggcctagaagcgcgagctgcagcagggaggagcacggtcgagctcgggcagcgatctcgaccagggcaggcacgagctcgaccacgagggaaggggggaccccttcgttccaccttcaggacggccgacgatgttgctgctgctgttgggggctcctgcaggtcagcttggcacccgagcagggactgactgtcgccgctcgtctcgcagaatggccggaaccatcgcccccaacgtctcgcgcaactcgcgctcgtcggctttcgccaagcggcagctgtacaagggtgcgtcgccccgttggccagagggagcaggctctgcagctcagcacagagcgctgacggccgccgtcccctctgctcttgccgctgccttcgtctgctgctctcactctcttcgccgccctgcgctcgctctctcgcgctttcacgtctcctcgccaacaggcaagaagactgcttctgcccctgccgccgaggagaaggccgccttcactgagaagacggtcggcggagccaagaacggtggtgcccgcaaggttcccactaacaaggcctccaagtactacccgtccgaggacgtcaaggcccccaagctctcgcgcaaggttgccaagacggcttcgctccggtcgaccatcacccccggaaccgtcctcatcctccttgccggccgctaccgtggcaagcgcgttgtcttccttcgccagctcgcctcgggcctcctcctcgtcactggcccccgcctcatcaacggcgtccccctccgccgggtcgcccaggcttacgtcattgccacctcgaccaaggtcgacatctcgtcggtcaaggttcccgagaccgtcaacgacgcctactttgtcaaggccaaggctgccaagtctgccgacaaggagggcgagttcttccaggagaagaagggcggtgagggcctgagcgctgagcgcaaggaggagcagaaggtgcgcctccccgtttgtcggtccgggttgtgcgagtcggccaggcggctgactaccggggcctcctcatcagacgcttgacctttcgatcatcgccgccgtcaagaagaccgagaacctggccaagtacctcaaggcctcgttcggcctctccaagggcgaccgcccccacgagatggtcttctaaatctcgcttgcgcgcaaaccctcgtttggcggcgggaaacagtgtggttcggggccggttgaatggattgggggaagagggagtgctttgcggggaccgagttccgtcccctgctgcgttcctttcttctcttgtccgacgacgcctgcccttgcctgctatcatgacttcaggactcaaaacacgtttcggcaggcgcttcggccgtctgacgcagacgctccctcgtgcccaccgtcatacgtcgcttacgattgactactcggcttaccgcttgcagtgctgattgaccacggacggcgacggctgagaaggagagatgggcatgagatcgaggagggacggacaacagacgagcggtcagcgtcgaccgacgtccgcctcaccagagctcgcctccgcggaggaacggcagccggtcgccgcgcttctggcgggcctcgagctgatagtagagcgagccgtcgtactgcgcacggacggcctcgcgcgagaggatgcccgtcttggggtcggccgcgaggagccagagatacgtccagaggaagatctgtgtgtggagggggcacaagacgtcagcctgcgccattctcgaaaagacacacgctgcgagaccgacctggaagacccagccgacgacgtcgagcacgcagcggttggcggcccacatctcggtgatctcagagaagtagaggccgtccttcttttggtggtcgaagcggtcaaagattcggtcaaacttgctcaactcgaagtggccgtcctggttgtgcggttgagcgaatgtcagaacctcggccctgggtccagatcaggagaagcggagaaagcgcacctggttgtacgagccggtatcgctgcagagcagagacgagtcagctctgagacgccgccgactcgagtcgcgagagaggtggcaaacgcacctgccatgcttggcgcgtgcgatgcggctgacgtcgaccgggaacaggaggttgggcacccacgacttctgcgtagggtagccgacgtgcaggacgtggaaggccgcggccgacatcacggcgatgacagtgttgaagccgagcgcgcgaaaaccggcgtaagtgtccgtcgggtagctggtagcgaacgcaaagggtcagccgcaggtcggggtcagtcataaagacgaaggaagcgagacagagggggagagagagaaatggagaggtcggcgggcgacgggccggacggagcggagcaaggacgcacatcaccccgcgcttcttgcggtcaaagtacgacgtgtgctgagcgagcgcgctcggcctgtctgtcttgaggccagtcggctgagtcatgttgatcgctccttatgggttcgtagggggcagcaggtgatggaaggagggcacgagggctgaacaggaagagcttgcacgagccaaggtagacggcgagatgacgaactgccacgcgcagcagccagccggaaggaccatcctgttttcatcagtcgcactgaaacctttggctggcaagatcaggccacggccaggcacggcttgacgcagagtcgacctgaacactcagctgccagtcgggaaggctcgcatgtatcacagctcgccttctgcccggccggcgacatggccgtcggcgatgtccgagctctccggctctgcctctgcgacgcctggcgactgctcgcccacaccgtccatggcggcgaccttggcgagtgcatcgctactgacgagaccgatctcgatcgtccgctgactggccagccgctcggccagcgcggccacttcggcatcgtagacctcccactcgggaattttccgcgcccgcgcgagcttgggctccttctgtagaacggaagggtcaggaatgagtcagagtggatcaaccggcgttaaggctggtcgagcggcacgcacagtcaaggggtcttggcaaagatcgatcctgtgaaagatcgttcgagagcagagtcagtctgcatttgcacgcgtcaggagagggttcgttcgcgacacgtacgtcttggcttcgctcaggctctcctggctgcaccaggtcgcgcaccagagccacgacttgtcgagcgtgtggatcggaatgtagtcttgcatcgagttcggcaggtcctggtcaaggttggctgcagaggagaagcaggataagccagcgcagtttgggcgacgacgttggtagacttaagacggacgcaccgagcgagttgggatcctgcgagaggccctggtactgccctcggagcatgtcaccggttgccgtctgccgaaggcgttttaggtcgacgacgtagagggccgagatgtggtacggccggccacggagggcctgaagccagtagcctgcggggcccggggatgacggctcgtgtcagcgacgaagagacgttatcaagagcaaagcgattgtctcacccgtcttccagaagcggaagccctccatctcctccttgtcgtcgcccatcggggcgtaaccgtaaggggcgccgtgcaggtcctcgtcgacgagctgcttgagatcagttcggacgatctggtctgtgaacaggcgggcgataaatcactggctgtcagtagctcacgcttgcctggtgaagactgcctgtagacggaccggcgtcgacaaagatgaccttgtccaggtccattgggaaaagcacgtccaggaagaggattttataggctggcaagacaggcaacgtcagaacagatcttcgctcgagttttcgcgagcgaatgtgacgtaccccagatcagccgctgcttctctttctgaccattcagccaggaaggccacttgtatgtgacgagctcgtattcaaagccatactctttggcgagatgcgggatgaactcgaggaaagacggcgacaggaagtcttcgatgaaccaaaacttgacggtcgcgtttgtgtgcttcatgaccgagagggtcatgattgaggcgaagcgctgtgggaaaaggcgagcactggtcagccagaccggacctacttgttggtcagccgccggagcgacaacgaacctcgtagagcaggccagaggcgacggtgaagatgttgatgtcggcctgcttctttggcttgactgccgcggtagagggcacgacgagagtggaccatctgcagcacaagtccagtcagttcgtttgtcgccatcagacgagcggtggcaagcggactgactgctcggagaaccaacccttgacctgcttgacgaaggagatggaggtgtcgaggacgtcggcttcttccatgccctctcgccggtcaaagcgagggaaggtcgtcagaccctggaagctggagagggcgaggtcggaacccgtctcgttgagcggcaactcctccgccccggctacgccgaggctctcgagcgagtagacctcctgaccgcggccctcgcgaatgccaaactcgtagaggccgggagtgctccgcctgcgttccgatgggcagggtcagctcttgccagcgagggcgatgggcgcgaacgagccacgacgcacaactggaagtagccaaggtttgccatgacgatcgtgtccgagacgaccgttcccttgggatccttgatctgaacttgaaggcctcgcggtggtgcccgggtgaccgcttcgcgcgcgtgaccctcgatcaagaggttttcgagctcgaagaccggcttgacgtccgagtcgaggtcagagaggcgcaaattgtcgaggtcgtggatcgatcgtcgcgggcggacaagccaagacgacggcacgtcgacaccgagcgtgaaaatggggtcctcgggcaagtcgaggaagtcgagcgtagggctggcagcgagggtaatcagcagtaaactgtcggtgaagcgagctaaggtaaaagatgagactcacggggactggacgtcaagtttggcctggatgctatagcggtagaagcgcttcaaaggcagctgaaaagatggcgcaagaagatcagtctcagtgaggacaaagcggtgtgacgtccgttcgtacctcggttgcttgcagagacggcaacagcaagactcggacgtagaccctgtccagggacgaaaggacctgcgaagaggcttgcagtcagtatcgaagacgacggccgtctcggtctcggccgacgcacccggagcatgcttgaccacttttgagcagtctcagtcagagggttgacgacgacgtcgacatgaacgagcgccgtctcggcgtcgccgatgttgaaggagctgctcaagaatcgcggtcagcgagactttcacatcgagaccgaagcgtagacagccgcacctggcgttggccgagaagacgtcatagtgtacctgccggctacctcgcaggggcttcatgatggacgagtaggcctctgcgggcgtgcttccctcggcgatgaggctggtcgtttggttcagcgactctcgcagcagcggcaggagactatcgaaggcgcagagtcaacggtcagtcaagggactggcgaagacccggaagctagcacgcactggaagaggtccatctcggtttctgcgacctcacgggccccgatccagagtcgaccgtctcggccatcgcctcgcatgccctgccaggtcatggctcgtccgccccgcagctgagcccaaatctggcggttgcgccagagctcccggtagcgcgcctcgtcgacaatcgagaggcccgacttggtgtcggccttaaagtccatgcccgcgaaggcactcgagtatagaggaaagttctgcgagaggtgctcgagcgcgaggatcgggttcaagtggttgaggatgagcgggaacgtctggagcggcatgactggagcggggaggtaaggtgtcagcaggttccgctcgtgaagatccgagcatcgaggccgcactgtcaagctgctcctctgtcagaggaatcttgttctgctcccacgaaactggaccgagctggtcctcgaagaagagtgactggtgatcggcaccgtcccctcctccttcagtcgcgaactccgctccttcagcgcgcttggcgcggtcgtcgacacttgagtactccatcttcttgaggaccatctcgacgccccagccggcgagaggtgtaggggcgttggtgccagctgcggcaagggcctcggacgcgggagccttgtagcgtagcagcacaggacgttcggcgtgcgttcgcgcggccgagagcatcgcgagcatgtcgtccggcgcagagggattgacatagaggacgatggtagaggaacgctcgcctccatctaggacggcatggtcgaacgggtaggtcttgagcaccctgcgaacaggggacaggtacgaaggggcaagggtcagccggcgcgtcgtctagcgggaagaggcgctagcctacgagcgagcccatggccggaagatcaccgacgtacctcgcctgctgctgattttgaatcgtctcgcgagtgcccagcagcgtctccaggccctcgacaccgcatgcgcgctggccgagcacctcgacccagctctcgcactcacgcagccgctcgtccgcaagctggtcggcgagcttcaggaaggcctcgactcgtggcgccgtctcacgagcggcaagaccgagatcccagagcgggacggcctccggtgagatgaaggctgcgacgtgtgaccgagcgagggcgaggagctcggccgggtcgtcgagcgcaggccggaagctggcgttctgggcgagcgcctggaggagtggtagaggcgaggcaaggctgtgaagggccgtctgctcgctgagagggagacgtccgcaaaagacacggaataggtcaaccgccttgtccgaaacctggcagaactctcagcagcgctgtgacgaacagtatctcgagcaggagatgatggccgcgccaggcagtgttgagcgcgacttctaccttgtgaccggcggaggcgagaccgacggccgcaaggagcccagcgaggcgactgagggtgcggagcctaaccatagatcggacctgtagctagcggtcggacggagaaaggcgaggaagctgtaggtagggacaggaggtcgacgtggctgaagcgtggcggtcggagggagagatgtcgtcgccgcgccgccggagccgcatgttctgcacggctgaagaagttgcactcagggaccacttgcgagacaaggaaaatttgcggcgcatcagatcaggtacgcagggatgcgggcgagatcggaggcagaagagcaaggcggaaggcgagagcgctggggagtacagtgggcgagcttggctgcgcgtgcgcaggcagggcgcgaaggtggagggaagccaaattacggtaggtaggagagagaagtagagccaaagtagcgagatcgagatctgcacataaaaggggaagagggcgatggcatgcgcctgctgaggaggatttggcgcgagtgccccttactgagacttggccttacccgggaagccgcgcgagaggtcaccggtcgggagggtaaagtacgacgtctcgggcgtaaggatgccagagatgccggtgtagaaggcgcagctgtcgagcgagagagagaagaagaagaagagggtgagctgctgagacgggaaatgctgcttggctgaaggaggaacgacgtacaaggcagtgacgagacccatgccaccaccggccttgtggaccatgttcgactcctggaactcgccgatggcaaggagcaggaacgtgatccctaaaacgcgaagaggaatgtcagtgctcaggtcgttacagaaaaagggccaaccagggcgagcccggacgcacataggaagaagaagacgctaaagaggccgacagacgacttgaaggtgccgaaccacatgaggaacgtgaacacgaaccacgtaatgagctgcaggagtggaagacgggcgcaggtcagtggctgctcctcgaatgagtgctgcggtcaaactcacgtagataccgagcgcgctctcaagctcgccctcggcgtaggcggcgccaagaattccagacgacggccagtagatagtcgcgaaagaaagccagaatccgccataagcgctgaaggcagtcgctccgaaggtgttgccgcaggcgaactgaaggggaggtgagggaaggagttaagggggagggtcagcagcgattcagagaccaacgggcgaggaagcgagccaactaacctcccacatgccggcgaggagctgggcaagaccgccgaagccgagggccatgccgacaatgacattagggtgctgtgggcagagatatataagtgagtacggcaacgcgagcggaagagcggaaggcgcgtgacgggcgcgagcgaccgtggaccgtaaaagccgggacggaccgtgatgtcccgaacaccggtgttgtaccaagagaggacgaacgtcgtcgaggcaaaggcaaggagacctgagatgaccagacgagcgtatacgagaggtcagctctctggagtcggcaattcgttgggcggacgaggtttcgccgcgcgacgcatggtacgaaccgagcggggcctggacgcggggttcgacaacaaagggcagggcaaaatatcgtccagtcagtcaacagaagaggacgcgagctcaggaggcgctcgtcgttggcgagcgaggcgacctcagcccagacgcacggggtttgcgatgcgtcggtggtagatcgggaaggccggctggcttgtgtcgacctggcagggtaagcggaacgagcgtccgaggggtcagctgccgcgtcccaagaggctggtagctcggtcgaaggcaaggcaggtcgatgacgcaccgggtggcctccacttgagagccgacgggcaagacaggcagaggttcagctcccggcctcctccagggaagcaacggcaaggacgcacggggtgacagcccgattgatgagcttgctgtccgagccggccgtgtactggtgacgaagcccggcgccgttgccgttggcgtggccgttgccgttgagcgtctcagcgttgctcggggtgccgtggagggggaggccgcgctcgatgtcggtcatctttgctgattcgggatgggagggtctttgggatggaagtggtggttgagagggaagatgcttgcacggcgtgggggtcctcgctctcgttggatcggtgtgtgttgcgtggggaagaggggagaagaagcagggaagggggctccgaggtctatatgcgttcggagggagcgagaccctttccgtctgctgcgcgcccgccggcacgacccggccgagcgggccttgttcgtccagtgacccggccttgacctcgttccctactctccggcaaccctcgttacaggcatcgctgtatgctcggacgggtcagcagcatagtaagcatcaggaccaggatgaagttcatcggtccgtccgtctcagagctctagcgagcggacgagctgtcacgccgtgccgccagctgctctcgctcgaagactgacgcgcttccctgcccctcttgcgacgctcgccctccgacatcttcctccttcccatcgcattgatgccgcccgagcagacattgccttcaacggtgcgcccgtgctccctcggcctctgcgacagggcgtgctaaatctggccctggtgcaccgtccctagcgaccgcgagcgagttcgcgggcgagtaccacggcaagcagcggcatccgcgtgagctgccttcatcctcgaaacccggcccggaccggtcggtcccgggccactggccgctggcagcctcctcctcatcgacagctgctgacgggggcctctgaccgacttaggtgacctgcccgccgtgctcgagcgagcaaaggaggccggcgtcggccagtgcatcttcaccggcggctcgctctccgagtcggaagacgcgctccagctcgcccacgagctaggtgcgatctctctcgcgcctgacttgcacgctgcacccggaactgaccgatcagcacccgcttctcctacttttcccgccactgccgcaggccagacggcgacggtcggccttcatccgacacgagcgactgagctcgcgtccgacccggcagcctatgttagcgccctctcggccctgattgtttgccatcgctcgcacgtcgtcgcgctcggcgagctcgggctcgacaacgaccgactgcactttgcttcggccgaggcccagaggaccgctttcgtcgcgcagctcgagctcgcgaagcagcacgacctgccgctgtttctccactcgcgtgcggcccatgacgagctcgttagcatcctgcgggagcatcggtcgctctgggagcggcgcggcggcgtcgtccactcgttcacggggacggtggctgaggtaggggaactcgtcgagctcggcctcgacgtcggcatcaacggctgttcgctcaagacggtcgagaaccttgcggccgtcgctgccctgccgctcgagcggcttcagctcgagacggatgcgccgtactgcttgtgcacgagctcgcacgcttcgaccccgcacctcgcctcgatcccggccgacgcgtcttgggcagccggcgggctcatcaaggccaacaaggccgacaagtggaaggagggcgagatggtcaagggccgggccgagccgaacggcgtcggccgcatcgcctgggtcgtcgcccaggtcaagggcgtgccggtcgaggacgtcgcggccgctgcctggcgcaactcgcgccgcatgttcttcggcgacggcgacctgccgagcgcaggaagagccggatcggccatatagatgcgagtatcttccctgacgactccttagatctgctcagccttggacggatcgcgatgtgcttgccgtttatactcggtgagaggagagactgcgctggcggcgaccgccggcgcgggcagattcgaagtcggttagccgcgtactctcctgctcccgaaccatcagctcgccctcgcccaaagcatctcactcgccgcctgtccgcccgcgcctccgttctctatttccagcgctctatcaggctttccagagcgtcccgacttcgcattatggcagcgccttcaacgaccgagggctcgcccgcggccgcccctccaccgcaggctgcggcccctacctcgacgaccgctgaggctgccgtcgagcccgccggcaaagacggcaagaagccgcctgtcgtcgtcctcgtcattggtcagtctcctccgcatcctgactgagagacttggcgagctcgaggctggtcggatcgctgacgtcggcccctcccctcctgccaggcatggccggctcgggcaagacgaccctcatgcaacggctcaacgcccacctgcactcggccggctcgccgccctacgtcgtcaacctggatccggctgtcagccacatgccctacacggctaacatcgacatccgggacacggtcgactacaaggaggtcatgcagcagtgcgtcccctcccacggcgagctgcgctccagctatcagcctgactgaccttgatcgcctggctcgctcgcgttaggtacaatctcggtccgaacggcggtatcatgacggcgctcaacctgtttacgaccaaatttgaccaggttctcggcttcatcgagaagcgcgcccagacggtcgagtgagtttcaacctggttgggcaccctctcgccccgctgagttcatttgttgcgcttcgtaggcacgtcctcgtcgacacacccggccagattgagatctttacttggtcggcctcgggctcgatcatcaccgacacgatcgcttcggctctgccgaccgtcgtcgcctacatcatcgacacgccgcggacgacctcgccgacaacgttcatgtccaacatgctctacgcttgctcgatcctctacaagaccaagctgcccttcctgctcgtcttcaacaagacggacgtccaggaccacctgtttgccgtcgactggatgcgcgactttgagatcttccaagacgcgctcatgggcgccaagaaggaggagggggacggcgagggcagtggctacatgacgggcctcatgaacagcatggcgctcgtcctcgacgagttctaccagaacttgagggtacgtagcggatctcttgatcgcaagaggcaccccaggtgctgaccctgcatcgtctccctctcgcagtcggtcggcgtctcggccatgacgggcgagggcatggacgagtttttcgaggcggtcgaggcggcgcgagtagagtacgagacgtgagtcgctcgctcgctgcactcagtcttgcagagagtccttctgacccatctcctgtctccagcgactaccggccagagctcgagaagcttgccaaggcgcgcgaggacaagaagacggcgtacgcccaggagcagttagacaggctgatgaaggatatggccgtttcgcccgcggccggcgcggccaaccccaacctctcgtcggcccggtcggcggcggcgtcaaagaagagtagaggcaacgtcccgggcgacgacgacgacggcatcatctcgcgcggccgctggcgcgaggacgacgcgccctggggcgaggacgaggacggccggcctcagcgggacgacgccgtcctgtggggcgacgacgacgacgacgtcgagattgaccggagcgaggagcccatcggcggcatgtttggccgcgggacgagcgctggcggcgccggctcgcagatgagcaattggccgcggccggcgtgatctgcatggcctcggacgacacgacatggctcgggaggggttgcgtgagagcgcattgagatcaagggtggggggagaggtgccgcagtctgagctcgacaggatggaggaagggggcatagggtaggcagggaggcgaagcatcatctaggcagagaagaggtgggagatagtagagaggcgcgctctactgctgctggccgctcgggggctgctggccggccggctggccgtagaactcgccccagccggcaccgccaccggcaccgccagcctgggcttgcgcggcagcctgcatctgcgcctgggcggcgaggatctgctggtagtaggcctgctgagcggcgagcgccgccgggtccgcagtagggtcctggccgccggcgggtccgccaggcctgggagcaataagcgaggagcgagacgagggtcagctatgagccgaaaggcgggaccgatcaccgagcgaaggagggacgcactgctggccgtaggccgggtagccggcgccagcgaaggggtaaccaccgtaggcggcgggagccatgccgtacatgccggcggacggctgcaagcaaacgatcgagagaagtcaacgctcgcgtcctgcttgagtaaaagcaaaggccgacgcaccatagcgtaggccgggatggcaccaccaggctggccgcccatgccaccgggctgtcctccgccctcgttggcgcccggctggcggtccttgccccacgagcacttgacgggccggccgtggacgagctggccctggagctggcagatggccatcgccgcattctcgtgcgtgtcgagcttgacaaaggcaaagcccttgtcggcctgcatgcggatctcgacaatgtagccgtagccctggaacagcggaattaggtcggcctgggtcgcgtacgggatcaggttgccgacgtagacggtcgtgttaaacgccggcgtctggccggcgacgacgtcaaacgtcagcggcccgccctggagattcatcggggcaggtgcgccgccggcgccgccgaccatgccgccgagccgaggggccgcggccgccgcaccgccggcgctcatgcctccgccgccgaggccgcccgtctgggttttctggatctccgaacgggccggcagtggtgtcagccgacgggacgggccgagcgggaaagggatcgaaggagactgacctggttggcccagttgacgcgaatcgcgcgcgagccgagccactcgccgttcatggtcgcaatcgcctgctcggcgtccgtcttgtcgcggaaggcaaggaacccgtagccgcgcgacttgccagacgacatgtcccacatgacgcgggcgtccgagagcgagccaaaggcaccaaaggccttgttgaggatgtcgtcgttgacctcgggcgagaggtcgccgacaaagacgtggaagtggttctgggtgtcttccttgttggccgtgccctggttggcccagttgaccttgacctcggtgtcaaagatcttgcggccgttgagcgtctggagcgccgtctcggccgcgcggagctcgtggctgacggtcggagagggaggagtcagcgcgtgcaaagccgaacgcgtgcagaagccagagaaagacgcactactcgacgaagccgtagttgagtccaccgtgctggaagttacggtcggggatgatcttgacgttcatgaccgagccggcgacggcaaagatctcggtgagcatgtactctggaggagggaggttgtgcacgcgtcagggtagagggatcgggagacgcgagcaggcaaggcgctcagggcgacgcaccagtgacacggggcgagaggttgccaatgtacaggtgagcacggctagagaggagaaaagaaggcatcgtcagctgctgggtgcagtgggacgtctcgctgagctcgtcggcaggaggacgtaccgctagtcgcgagggcggaggacgaggcaaggacgcgagccaaagcgaggaggcaaggtcagctcgtctgcgactctcgtcagaagcgcggcgcacggcattgacgtacgggagccatgccctcctgaccctcaggctgctgctgctgctggccggcgtccatcgttggggatcggggtattcgggttggtcggagggaggacgagtcggaggcccggagcgaagggggaagaaagagagagagagaggaagagcggagaagcaggagacccgagagagagagagagagagagaagaggaaggaaagagagagagagagaaggaaggggagcggcgagtggctggacgcgtcgacggtgaagagggtgacggagatgggtcggccagcgaagcagagcgtcgcagctttccttctcatccgcgcacgcgcgcgcagcccagagcgaccaagagatggtcagcgccttcgtcccttctaacgtcgtcctgacgcctctataccgaagcagcatgcctctaccaagcgaactacctctcctccgccgcacgtcgtccgccgtctttgaccccgtgacgcagagccttcccagcagcgcgaccgcccctccttcgccctcggccgccgccgcccagcgcgccctgccgccggccgacctcgccgccggtccgtcgctggcttcgctcacgatgctatcatcaagcactaagctgaggctcgctcctcacgattctctccagacgtagccacatctggagacgatggcttcgcatcctcctgcgtcatttcgggcggcaccggaggtcggcctgggtcctcctgcaacgctgcgcgatcaggcacgcgaggcgctgacctccctccctctctggctcctgacgctcgcaccgctaggcaatgccatctgccatgccttcaggcaggcggcctttgtccttccgatctctgacgacggagggtcgtcgtccgagattctccgctgcctcggtacgtcgccaattctcgctctcgcccgactgtctcccggcggcgagactgacgtcgcgctaccctgttgctgcccaaaggtggtccctcgataggcgacattcggtcgcgcctgattcggctcgcaccttcgctcgacgatggtgacgaggctgccggcgccggggcgagcacgctcgacgaggcgcttgggccgatcgttcggctgctctcgcaccgcatcccagccgacgtctccgaggctgatgcgaaagcgctctggcgcgaagtcgtcgagggtacctcgcccctctgggccgacatccctgccgaccggcgcgaagtcctccaccgattcttcatcatctttgaaggcgagacgctccaacgggcgcacaaggccttctcgttcgtcaactgctcgctcggaaacgtctttctcgcctcggcccaacgcttctttctctcgctcccggccgccatcttcctcttctcgtccatcaccggcatcccaccgggccggtcgaccgtcctcccggcgatcctgacgaaccggacggcgacgatcgcggccgagctcgagagcggcgagacgatcgtcggccagtgcaacatttcgcatccggcccgcgattatgagcctgagccgagcccactggcgagcaacacaccgcccgagggcgactctgcatcgccgcgctcggtcctccgttgggctgcgggcgccggccaggcctggtcagcctcgcccccgaggtcagggacaccatcgtccttcggcggcgaggacggcatcgactctggccggggcaagtcgaagctcccggcgttcaaggcgggcggtcggggcgtcgggctcgaggcggtcggagggggcgggccgaagaacctcatcttcaagcggacgggccagggcgttgatgacgacgagacgccgttggaaagtcggatccgcaggctgtactacattaactcttacggtcaaggtacgtctctgcacggcggtgagtcaggtttgcgcaggtcagctgaccttcccttgccttggcagaaatctttccgatccctaatccggaagttctccaagcccttgcacagaaggaggttctcgtttatgtgaggcctctttcgtcctcgctaccccttgcattggccttctttgctgaaccgcgtcgacttatcctcctgcctcattaagtcttgcgggtcgctctacacgtcgctcgccccttgcctcgcgctgagcgggatggcctcggccatccggtcgagccgaagcctccgggcaaaggtccttctcctcaatccgacgaacgatcgcgagacgcacggctacagcgcggccgactacatcaacgcgattgcacagacgctcaaccggtccgtccagcgcaagccggctggatgccgtcttgagagtagtcgtcaactcctaggctgactttccacggcctcgcttcttggtccaggtatgatacgagctcgtccgcgccgacccgcaaaggctcaatcagctcgaccttctccatgacgagcccggccgatgcgctccgccaggcagtggcggccgtcccgctccggatcgcacacggcgcgctcatcacgcacgtcgtctgcatcgaggggtgctcggtcgaggtcgacgaggaggcaatcaaggtacgtcgccgccctgagtcttccttcatcaaccgctgactgaccgggctggaccgcaacccttaggccctcggtattcgcgtcgtctggatcccgccatcggcgggcggaaagcttcggttcgacacgcgctcggttcggcaagcgatggaggccgttcggcggtcggtagggccgtaatcatctgcctgcgctcgggaagagaggtggggctggctaccaacatggccaccgagcttggccggccgaacatcgtccgtctgtcgattatctcgttcggcagacaacccactatactttccctcgctccaatccggtgccagggctgggctcgaagaccctcttccagttccccgctcggcgagacaatagacgggcgccaaacaggactagcttgtcgtccatcttcttctcaacctttgcccaccacccatcccggttgacgcgtcggagctgcacctgctcaaaggcgacaagcggcccgccccagtgagattcgatcggcgctgtagacaatgagagggcaaggacctcgcacagcatgagcacgaaggaaggcggcatgctcatcgagcgcctcgtggcgatcggttgggtgagaaggatggcgagggttcagaatgagatgagcagcgcctcttccggctcctgccgctgctgcgagtgctgctgctcgccgacggcagcccactcggccgtcgctcggtccccctcggcaggcgcatcagcggggacggccgggaaggcgctgctgagcggttgcgagacgggcgcggtggggaaggcgctagcggcggggctggccatcggtgccgttggtgaggagggctgctgctgctgctgctgcgaggcaggagggaagtacgacggctgagacggcgcgcgctccggctgctgctgcagttgaggctgatacggcgtgtgctggataggcgaggtcggcggcgaatgcagcgtcggctgctggccgctgccgtcaagggcagaaggagggccagaccaggcattctcggcaagcgggtatggctcgaccgggtatgatggctgctggtgctggtgctgccgttgtggcggctgcgacggctgcccctcggggagctgcgggtagacgtcggcgctgccgactggcgtcgatggcaggtgctgctgctgttgcgccggtgccggctgctggtgctcgtacgagtgaggaggcgggtagccgctccaagaaggcgtctgcgagacgggcggccggccgtaggcatactggcctggtgggtacggttcgtgtgcctgccgctggtgctgcggctggccataggggtccgatccccaagccggtgccggcgatggctggtgggcgtacgggtagccgccctgcgacgacgacgacgggtacggctggtggtgcggatagccgtaggccggctgctgccatgacctgcgctgagcgttagcagcagcccgctcatgctcaaccgcggcggcccgggcggtcgcgaggtggtcgtacaggccgacggcctcggtcagcttgacctgcatctcgcgcaggatgcctgtcgagtgagggacaggcagacgtcagcggcctgaagcgcgatgcgaacgaggaagttgagacacgacgcacgctgtcggttggagacgtcagcctcgccgccccggacgcgaccctcagcgaccgtccgcgcgtggtgggcgagctcgtcaatccctgggaagcggctgacgtcgccaccggcgcgcgaggcgagcgcaaccgtctggccaaatgtcaggagtgcgtcctcttcggctggcggaagctcccacggccgagggggaggaggcacgacatgctgagttgccgtcgccgtcgagcgcagagaggatgaggacgaggcggagcggttgagcggcggaggggctgacggcgcggctgccatctcgcggaggctcgcttcgatcgctgcgcgcaggtcggcgtcttcgtcttcctcgtttgccgtccggtcgacagccgtgtccttccggccgcagtccgtcagaggcggctcagacccgtagaccggcgcagggacgaacccccgcgagccgccaccggaggcgctcgcgttggcctcggcaagtgagagcgcgatcgcccgcgcaaggtccgactcggcgtccctcctcgcgctgtccctcggccggccacttgctgaccggccgccgccaggccggacgagctccttcttgccaggcaccgtcggccccgcctgcgctgccggcgtgtccaccttaaccttgctcttcttcgcgagacaaccgtcgcagacgcggactggctccgcgacgccgtaccaagggagcggcatgcttcccgccgagcaggcctggtcaaagacgcgcccgcagttgcggcagtggtgcttgcggttggtgaagctgaagggcgtccggcagcgctggcagacggtcgcgtccgaccaggccggcagggtcgaggtcgaggtaaaagccgaggccgagagcgagagcgagacagcaggaggaggcgggaagggcatgcctgcaggaggagggatcaaggtcagtcatctcttcaaagaacaggcgcctgtgcgggtcagggtgcgtagcctgcgcgagaagcgccgatggatcgagctagagatctgcagacgtggctgcaggaggcaggcggaggagaaggaggcactgaccggtcgtcttgagcccgttgtacgtctcgacaaggtaggaaagctcgtcctttgccgcaaacgtcagcgcccactgctggacgaggtcgagtgcgagcttgcggacgtcatgattggcggtcgaccggcagaggcccgcaagtgcgtcgaccggatcgcgcgcaccgatctcggcgaggaagtggtcgccgccgttcttgatgcagccgtcgaggagctgatgcgatgagagagcgagagacggtcagtcgcttgtgctggctgcggcggagcccgttgcaagcccctccccatctcgttcaagccaatcgattcgaatccgctctccctctgacggcctgcacccggaacgcaccctgagcgcgagcagctggacgttcgggttgcggtcggtgagcttgcgcttgatcgcctgggcggcgacgcggggctggacctgcttggcccggatctggtcggcgaggtcgaggttggtcgcaaggtcgtgcgtgccgatcgggatcaggggcgaggtcgccttgtcgagcaagaggtcgaaggccgacggcgtaaagagccatgaggccatgctaggcggacaaggagaggagaagatggaaggtggtgccggagggaaggcgagccgaggggaggagatgggcgttgctgctgcgtggcgtctctctgatgcaggttgcgatgcatccaagcaggtcgtgtcgctcttccgcccgggcgagctccctttgcgcgcccttccaccgcctcctgcttgctctcgtcctcatccctccttcttcctcctttcgccagccagcagcagcagcagccagcacacggacaagactcgcagcacgcgcgtctccagatcgacgcgctcccactcgcctccggcagcctctaggcgttcacgagagcagcctctcgtcgtccaacgcgtgccttgccccgggcatctcgccgccgtcaccttctctcggccgacccgacctctcgtcgtcgctcgctcggcccaagagagctcgtccgcctgcgcgctcataggtctctgttccagtcagatcagcctagccacctgcgcctagaccccggcttcagccgtccctcctctcaccccctcgtccgccacctcgaccgccctcgtctgttcgcccagcatgccgctcggcatcggcttctcgcactcgaaggctccggtcaagacaatcagcgacattcagtttggcatcctctcgcccgaggagattgttcgtcccgctccccccctccctgccttgcaagcgagaggagcagggcttaccaccgcctccttcttcccccccccccttcctctctcacgcgctcgtgctctgcgctcacccccgagtagaaggcctactctgtcgcgtcaatcgagcaccccgaggtcattgacgagtcgactggccgggcgaagcgcaacggcctgatggaccccaagatggggacgatcgaccgcaacttcaagtgcgagacgtgcggcgaggccatggccgagtgccccggccactttggccacattgagctcgcccggcccgtcttccatgtcggcttcctgatcaaggtcaagaagatcgtcgagtgcatctgcgtccagtgtggccgactcaaggtcgacggcgaggacccggcgatccggcagattgtccggcggatcccgcccaaggaccggctcaagtacatctgggacaaggcaaaggcggtctcggtctgcatgcaggacgacgtcaagtcggaggacgacccgaacgccgggccggtcgagccccagggcatccagcaccacggctgcggtcacatccagcccgtcatccggaaggagggcctcaagctgtttgtcgtctacaagaagtcgaaggaggaggatgacgaggtgcttggtccccctctgatcgtaaagcgtccttcgtggagagctgacattcccctgtctctcgttctcgcctctcgcaggacatcaagatggctcagcccgacaagcggccgttctcggcctcggaggcgtacgcgctcctgcgcaagatgacgtcggccgacctgtcgctgatgggtctctcggaggcctatgcccgacccgactggatgatcctgactgtcttgccggtcccgccgccgccggtccggccgtcgatctcggttgacggcggcgcgatgcgatccgaggacgacctgacgtacaagctcgccgaaatcctcaaggccaacgtccagctgcggacgcgtgagcaggaaggcgcgccgccgcacattgtggccgagtttgagcagctgctccagtaccacattgcgacctacatggacaacgacattgctggcatcccgcaggcgatgcagaagtcgggccggccggtcaaggcgatccgcgcccggctcaagggcaaggagggccgcctgcgcggcaacctgatgggcaagcgcgtcgacttttcggctcggaccgtcattacgggcgaccctaacctccagctcgaccaggttggcgtgcccaagtcgatcgccatgacgctgacgtacccggagcgaggtgcgtcccccttcatcctgcactcgcgcctgctcgagacgccttgactgaaccccccttttgccttccctctccccagtcacgccgtacaacatccagcacctccaggagctcgtcgaccaggggcccaacttccacccgggcgcgcgctacgtcttgcgtgacacgggcgagcggatcgacctccgatacaacaaggagcgggccgtctcgctccagtacggctggatcgtcgagcgccacctcaaggacggcgactttatcctcttcaaccgccagccgtcgctccacaagatgtcgatgatgtgtcaccgagtcaaggtcatgccctactcgaccttccggctcaacctctcggtcacctcgccctacaacgccgactttgacggcgacgagatgaacctccacgtcccccagtcggaggagacgcgggccgagctcagccagattgcctgggtcccgcgccagatcatctcgccccaggccaacaagcccgtcatgggcatcgtccaggacacgctgctcggcatccggcgcttcacgatgcgcgacacgttcctcgagtgggatcacgtccagaacatcctgctctggctgccgggctgggacggctcggtgccgacgccggcgatcctcaagcccaagccgctctggacgggcaagcaaattctgacgatgacgctccccaagggcatcaacattgccaagcgggccgaggtgccgtcgccgatccacccggacgacgaggaggtaattgtcgagaacggcgagctcctctgcggcatcatcgtcaaaaagatggccggcgcctcggccaacggcttcatcgacgtcatcttccgcgagcgcgggcccgaggccgcccgcgactggatctcgacctgccagctcatcgtcaactactttttgcttcactgcggcttctcggtcggcatcggcgacacgatcgccaacgaaaaggtcatgggccagatttccaaccgactccaggaggccaagcgcgacgtcctcaagctcatccacgacggccagcaggacgcgatcaagcgtcagcccggtatgacgatccgcgagacgttcgaggcccagtcgaccaagattttgaacgaggcgcgtgacttcgccggcaaggtcggccagaagaacctctcgcaggagaacaacgtcaagcagatggtcatcgctggctcgaagggctcgttcatcaacatctcgcagatgtcggccctcgtcggccagcagattgtcgagggaaagcgtatcccgttcggcttccgtcaccgctcgctggtccgtcatatccgcgctccctctctctcttgcacaccagactgaccaatcctcttcgatctcagccccacttctccaaggacgattatggcaccgaagctcgcggcttcgtcgaaaactcgtacctccgcggcctgacgccgaccgagttcttcttccacgcgatgggcggtcgcgagggtctcatcgacacggccatcaaaacggccgagaccggctacatccagcgccggctcgtcaaggcgctcgaggacgtcaaggtttgctacgacggcactgtccgaaatgcaagcggcgacatcctccagtttgtctacggcgaggacggcatggacgccgcgtttatggagaaccaaacgctccacggcaaccggctcgatgaccaggcgttcgaggacaagtaccgggtcgacctgctcgacccgcgcttcaagctgccggccaacacgctccaggccgggctcgacctctcgtcggccgagctccagaaggcgctcgacgccgagtgggccggcctgctcgaggatcggcggctgctccggcagttcatcatgaaggacaacgtctcgtcgctcccgctgcccgtcaacatcagccgcattattcaaaacggccagcagatcttccacctcgacaagcgtaagccgtcggacctgccgccggcgtatgtcgtcgagcgcgtcgccgcgctggccgaccggctcatcgtcatccacggcgccgactcgcttgcgctcgaggcccaggacaatgcgacgctcctattcaagatcttgctccggtcgaacctcgcgacgcgcgtcgtcctcgtcgagcacaagctcaaccgcgagacctttgactgggtctgcggcgaggtcgaggccaagttcaaccagtcgctcgtcaacccgggcgagatgtgcggcgtcctcgccgcccagtcgatcggagagccggcgacgcagatgacgctcaacacattccactatgccggtgtctcgtccaagaacgtcacgctcggtgtcccccgcctcaaggaggtcatgaacgtcgcgaccaacatcaagacgccgtcgctgaccgtctttttgacggacgagatgcgggcgagcatcgagacggccaagctcgttcaaaccgacctcgagcacgccacgctccggaccgtcaccgccgccgtcgaaatcatctttgacccctcggcaaccgagacggtcatcgaggaggacaaggagtttgtcgagggcttctttgcgatgccggacgagggcaccgaggagaagctcgaccggatgtcgccctgggtccttcggctcgagctcgaccgcgcaaaaatgctcgacaagtcgctcgagattgacttcgtcgccggcaagatttctgaaaagttccaggacgacctgcatgtcatctactctgaccagaattcggagaagctcatcatccgctgccggaccatctcggaaccgggcgagaaggaggacgccgagatacaggcgaacgaggacatgttcctccagaagctcgaggtcgagcttctcgacaagatcaatctccgcggcatcgagggcatccagcgcgtcttcatgaccaacaatgacgagaagctccaggttgtctcggaacgcggccagtgggagaaggtcaaggagtggtacctcgagaccgacggctccaacttcaagcgcgtgctcgcggtcgagggcgtcgacgccgtccgaacctactcgaacaactgcgtggagatctacgacacgctcggcgtcgaggccggccgagccgccctctactcggagctccaccttgtcatttcgtttggcggttcgtacgttaactaccgacacctgtcgctcctgtgcgacctcatgacgcagcgtggtcgactcatgtcgatcacccggcacggcatcaaccgaaccgacgccggcgcgctctcgcgctgctctttcgaggagacggttgagattctcatggaggccgccgccgtcggcgaccgcgacgactgccaaggtgtcgccgaaaatgtcctgctcggccaggtcgcccacatgggcaccggcgcgtttgacgtctcgctcgacctcgagatgctcaaggacattgtcgtcgaccatcggctgcccgtcgccgccctcatggctgcccagcagcagggcggcatgacgcccggccccggcgccggtgggggcatgaccccgtacgagggccaaggccgcttctcggtcagtcgagccctgtcgctgttgaacgttgtcgggcgcaaggctgacgaaacctctgttttcggcctgcagatgggcctcgacaacgtctccgacacgggtgccttctcgccgatcattcacggcggctcggacgaggcggcctcgtacgactacatggcctacggccagagcccgatggccggcggcatgggcggcatgagccccgcgaccggctactcgccctcgtgcgttctcttgccttcgcacttttggacgaacgcccaaactgacgtcctgccttccactctcacctgcccaggtcgccgtcctactcgccgacgtcaccgctgttgatgcagacgacgagtcccttccactctggcacgtcgcccttctcgcccttcggccgggccggctcggccacctcgccgctctacagtccagcgtcgccttcgttcagcccagcctcgccgtcgttctcgccggcctcgccctccttctcgccggcctcgccaagcttctcgcccgcatcgccgtcattcagcccggcttcgccgtcgttcagtccagcttcgccgagttacagcccggcctcgccccgctactcgccgtcgagcccgcagtttgccggcgcatcgcccggctactcgcccgcttcgccggcgtactcgcccacgtcgccacgctactcgccgacctcgccggcagcacggatgtcgcccgcctcgccgacgtactcgccggcttcgcccgcattctcgccaacgtcaccgacctactcgccgacgtcgccgacttactcgcccgcctcgccggccttctcgccgacgagtccgagctacagcccgacctcgccctcgttctcgccgacgagcccgagcgggaccaacggcgccggtactggctcgcaagcgagctggaagaaggccggcagcggggctggtgcgagtgcatctccgagctggaagaagtgagcgcgctcacgccgctccttccaacgacttgtaccgagctcgcgtgtaccatgcttctcgatcttgcccttgctttggggcgagctgcagccggggagggatcggtcatggtcatccggtcaaagatctcgcgctacagcccgcggaagcggtgcgacgtctgcgtcggccggtcttcagacatcgtttcggcaacctcgacctgcacgtgcatttcgtgcttgattgtgacgccctgctgacgacccttgccgttcccgccgaacatcttccagccagggcttcctcctcctccgtcgtccgacaggtcgcgctcgtaggcctcccgctccttgcggccgtcggcgctgacaaggttgctgtccgactgcgagtagtggagctgcgacgtcgacgtcgacagcgcgtgctcctcggcgtccggcataggacgacgctgtcggccgtcgcgcatcctgtcccacaagctcgccaaacccgatcggtagagggcaaactggtcaagaaacagggccggggcggaggttagctttgcgagagcggaggcgtcacaagtgccgcggtatagacggaccatctcgctctgggagccaaagagctggtggaaacgagggccagacgaagggtcagagcggacgactttggccctaggtctggagaaggaagaaactgacgacaaaacagaagatgcccgagaggaccatcatccagtcgagcgcctgaacatttttgccggcaagcgcgagggcgatgccaatcgaggcgataaagaggaagaggccgagaccgccgacctcgagcagcatggcgagcgtcgggccctcgagtagcttctgctggaaaggcagccgcttgttgcgccgatgttggaggacgatcgttgcgactgtcgctgcattgaggagcatcgtcatgacgctgaacgcgagtgactgtcgccggaaggtgtcggtcagcggggccattggacgcttcgagaaaagcgacccagacggacaatacctgagcccacttggttgaaagccggattggcgaggtagcaataaaggccggcaacgctggaaggcagaaaggtcgcagtcagtgttccgcctcggccacgtctcggcctcctcgacgcacaggagcatgttgcgattctgaaggccgaggatgacggcagagatcatcatgccgagaacggccgcgcagggaaggacatagagctgccgcatcgaatggctgtcagtgacgcccatgacgaacgagctgccagtcgaagggacgcacgaggagagtcgtcaccacgcaggggagggcacggccgtttgtctgggtccacagccagagcgtcatcgcaaagattgaggcggtgaggtagggagcgccggcctgaaggatggatgcctggactaggcagaggccgaacggcggccggtcagtcatcggccgagcaccattctcgagaagcctgcaggaggaaggcgtcggtcagccgagcctcaagttgaccggaagcaggagggcagatgagacgcacgagaggatgctgccaatgaggtagagtgcaagggcaccgaggaagacgaggagcgatggatgccgcgagagcgaagtcgagagggtgagcgagaggaggaggacgaaaagcaggacgatcgagatgatggtcaaggtgagaaagaaggtaaccttcgtttgagaggggtaagagaggacgaaaggagagaggccgagcatggccgtcggattgacggcgggttccatatagcggctgaaagaagcgagaggagccgaggccgagggtcgagttggtgaagcaggcgttctggccagccgtcgacaaagctcagaagagagggaaggaaggtggtggtgttggttggtttcagggacgagctcgtcgccgatcctcggctcgtgatagcacgcgctccgtctttcttgaccggtcgacccatcgtggggctacaggtcccggagtgacccctgagtctgcgcctcgctactgcgctcagggacggggtcgcacaaggagggcggccggagtgcaggcttctaagcgcatcagcgccacacagcctcctctatcgagaggctggacagtgaccgtttcgaaggcgaggcggtcccgtcaaagagccctcttgatcggctggctcgtgctggagagggcaggagcaaagaaaggggtcgagacaggaggggcgcagtgggtcggtgagcccttgctgtcagccgccgcatgcgctgagctctcagaggtcagcagcctcccttcaccagcgttctttcccacctcagccaagccagtgagcgagcgacaaagggaggctggaaaggacgagcaggaccgtcgttctcgtcggtcggcgacctcgaccggcgcgacggcgggaaagtgcggatgcgagcgcgactttcgacttctggcggcctggcccggagctcgtcccgacctctgctactgcagcgccctcctctacccacccccgacacgcagcccgcacgcccgccatgtctgccgaggaagccgcttcgagctcgaccgctgctgttgccgccgccgctgctccggtagccgctactgctgccgctacttctgccgccccggccgcagcgtcgcgtcctatcccggccggcctgacgccctacacggagcagtcgacaacgatcctcctgcccgatgacaacacggctttcctcaacccggttcagcagttcaaccgggacctgtcggtcgccgtcatctcgacctggggccaggtctggcgcgaagagggtaaggccgagtgggaggccaagctggccaagaaggccagcaaaggcaaaggcaagggcaagggcaaggcgccggcgcccactgctgccgctgctgccgtcgaggagccgtcggccgcgcctgctgtccaggccgcaccggagacgaccatgtccgagggcgcagaggctgtcgttgccggcaacgccgaggttcgtttgaggtgcttgcccgcgtgcagcgacgaagcgttgcctccgcgtcgcgtttagcagcgctgacgaccctcacgcctccctgtcactctccaggcctcgacctcgaagtccgattaccagccgaaggagtttgtcctgctcgaggcgctctcggcgacgggtctccgcgcgatccggtacgccaaggagatcccgggcgtcaagtttgtgattgcgaatgacctgtcgccgacggcggcggccgctatgcgtcgcaacgtcgagtacaacgcaatgggcgccgaggacaccgctccgaccgacaacgtccatgcgaccaagaaggaggagtggaagggcaaagtccgcgtcaacgagggcgacgcactgtcagttcccccgcagcagctccctcctcgtcgcgggcatcgcatcctgcgctaatccagtcaggtccccttgcctccccttcacagcatgctcatgtacagccatcgcgcagacaaggtcgacatggtcgacctcgacccttatggcacggccgcgccgttcctcgactcggccatccaggccgtcgccgacggcggccttcttgccgtcacctgcaccgacatggccgtcacggccggccacaactacccggaaaagtgctttgccaactatgggggcgtctcggccaaggccgactactcgcacgagctcgcgctacggctcctgctcaactcgtgcaacaatgtcgccgcccgctacggccgctacattgtcccgctcgtctcgctctcgatcgacttttacatgcgcatatttttccgcgtctacacctcgcagctcgaggtcaagcagtcgtttgccaagtcgggctcggtctacatttgcgccggctgccagcagtggcacatccagccgtttggccgcgtcaaggaggccgtcaacaagggcaagaacatcaatttttcctacaagacgatgccggggccgccggtcgaccagcgctgcaaggactgcagctttacgcaccacgtcgccggcccgctctggctcggcccgcttcacgacccggccttctgcgagaaggtcctcggccacgtcgccgccaacgagacgtcgttcagcacggtcccgcgcatcaaaggcatgctctcgctcgcccgggacgagctcccggacgcgcccttctactttgacccgtcattcctttcgggcctcttccactgcacgtgcccgccgatcaacgaggtcgcctcggccctcctccacggcggcttccgcgtctcgcgctcgcacgccgcgtcaggctcgatcaagacggatgcgccaatgacggtcgtcctcgacgtcttccggtcgttcatcaagcaaaagttccccgtcaagatggagaagattcgcccaggctcgcccgcggccgccctgcttgccatcgagcccaagtacgtctgcccccccgcctttgatgtctgacaccaggccctgaccaccctctatccctttcctcaccagggaggaggccaatttcacacttcacccgcagacaacgacggccatctcgcggactaagctcgtccgctaccaagtcaatccggcgcccaactggggaccggccggccgggccaagaacaaggcctctgcgccaggcaccgagagtgctggttcgaaggtgcgctcagctcgcctcagcaacgagacttcctcaggctgacctttcgctttctctcgttatccagcgcaaggcccctgccccggccgacagcgaggccgccgtgctcgagaagaagcagcgacttaatgccgagacgtcgccgaaggtcgaggtcgacgaggaggcggcgatgaacgcctgaaggcaggcctcatgatcgatgatgctgtgcccgccagagcgatgaaacaggctcgtcaggggcgtcaaggtccgtaagatctagccggtcgtgtagaaggatggggagggcaggagtccgaccgcggcgaggagactaagctaggtaatgcaggagaaagagagagagccgtcgtctaagcgagggctgcgaatgcaaaaccgacgacgccaaggagagccgcccccgccactgacggcaggccggcctggcgccaaccggcgctgccgaccgtcttgcccgtgccgtcgctgacggcggacgaaccgcggaggcgaaagttgcggtagtaggacgactggttggccggactcgcccagctaatgtcggcgccgccgaaaaacgtgctgaaaaagaggccaccgaccgaggtgatggcgtcggacgagcgcagctggaggttatcgtgcgcgagcgcgagcgtgccattggcgtagagaaagacgcggccgttggcgacgctcggcgggttattaagctggacaaagaggtcgatcgacgtccaggcgtccgtcgcaaagcggaacgagccgcgagagaggctgggggagggaggacatgagtgtacaggtcaattaccgggaagtggctcctcagaccttaaggcggtgaggggcgacgcacgaggttccataatcgctgttgcacgtcacgtcggacgccgtgcacaggccgtagcccttcgtcggaatgtaggcgtagacctgagggtcggaaacaagtggtcgcggcggcgtcagtcaccagacggtcgtcggtcgtcaaagcagtcggtcaggtaacctacctctcccgccccggcggcgcgccacatgagtcgcgagctgaagcagctcgcgccgtcagcctcgtgtccgcccgagcacccgcgggggtccggcccgccccggagcccagggagcttgccgccctgagaaaaggcaaagccgggcgaaaagccgacgtcgtacgagaggagcatcgacgagagcggagcggacgagccgttgagcggttgggcctgcagcggacgtagatcggttgaggataggaggtgaccaacgggtccggcgagcacgaaatagccccggtcagcggcggaccacgaacgcgggaaaggggaagaggggacgcacgtagaactgggcgccgcctttgccgtctccgccgaagctgccttgctcatagtcgacctcgatgacagcgtccgagcttgatgagtcgaacgggtcgtccgtgaacgagaggtagttggctccggcctggatctgcgaacgaggtgggcgaaccgagcgcaagcagggcacaggacggtgtcagacgagctgcctgcctcggatgaaccatttgccagtcgctggagaaggacagacctgctgtcggttgaggctccagttctccttcaggtacgacccggcctggctggacgcgagcgccctgctcggccgcggaagcgtgaacgtctggctgaggccgaactggctgacgagggcgtcgaccgagctcggcgcggccggcgagagctggaaggcctcggccagagggagcgtgctcgcgacgacgaggccgagaagggcgagcgaggtggcgcgtgcgacggtcgaggggaccgggcgcgtcgtcggagacggtcgagctgaccgtgcctgctggctcgagaccatcggggatgacgaatgcgggcgaggtgagaaaatagagagaaggcgcggcgtccaagagcgggctagcaggcgaggtgctcgggcgtctctatgctacaggcgagggatggtcgaggagagagaggaaggtgtcgcagagagaaagggaaggcgaggtgtggtcgcctcgctcgcttgctcgccgccgagcaagccgagccggaccgtccgggagcgatcgaaaccgtcgcccctttcagctcctcgtgcgatcgctgccccttcgcccttcgagcggccgccattgacaaagtcgggcagcgacgtgcggccagggagcggataggaaaagaacattgtaattccgtttctggcccgtgttccggcggctggccgatgcagtggtcacctctctcgccgttcccttcggccctgctgccaaacatgaggccaacgcgttgtgccgttgtacgcgtctgaacccgaggggtcgcaccggccgcctcgaacgttgccgtccactgccactcgcgtcctacgcgaagcgacttccccgacgccggtgcccaccgcccacgctgcccgtcgctgaagcagccgcctcgccgagctcgccgctgagtcgctcccaagcgccgacggcccagcgcgcgccctcgagcacagggacgcgccggctccagccctcgggcgcgccgccgtcgatgccgccgccgccgccgccagagagcccggccgactcttcgccgcctgcgagtgggagattggagaaggagccgctcgcgctcggaaccgggtccgagacgctggcgaggatgaggaagagcgggtagaaggtcgcgtagagcgacgtttgggcgagcgccggcaggaagggcagcgtcgaaagaagcgtcaagggcgcgccaaagccggcgagataggcccagcgagtctgaaggaacgtcagccgctcgttgatggtgaagcctttggctgaccagctatatgtgtgccgcgatggttcagcatcaaaagtccctcgctgccacctcgctgacgcaggacttacgaccagttaaagacgtaaaagctgttgacaaacaggctgtacgttgtcgcgagcggccagccgaggtaggggatcaagtgcagcatcgacgtcacgatcaggtagtcgagtaggatgatcgtcctcgtcgccctggccgcaggcagccggagagtcgcgtgtcagtttgctcctgagatttctcatgcagcgaagccaacagggaggaggacgcacaggctcgaaccagagccaccgccaccgaggcccttgccgccgacacccgctgcccgaccaccgccgaacgcccgctcagcaatcaagccctggtacttgccgttagcgaggacgacgacggccatcccaacggcctcccaaaggtacgtcgagttgagcgcccacgcgatgacgctcggccgctgcggtccgccgggaccgcgacccgaaggcgacgccgtcgacaagagcggcaggatgagcgtcgtgaggaagagtaggccgacgaggacagggatgttgatgagtctgccggaagcagaggcgggagggtaggaagggtaggtcagcgagcgggctcagcgtgaagctcagcaatctctcagtcactgacagcgaccggacgactgggttgacgacagaatgggcaggaagggggacaagcaagatgtcacggctgggtgatcagctcttggcccgcgcaggaacggaggcaggggctggtcagggaagctcaccgctcgctctcaggtgtgcgtcgctgcaaaggtcgagcgaagacgtcagccaccgcttactgacgttgaccgagagcgtgtgggctaagcaagcaagagagacagaagaccgacctcgagaccatctcaaacaccctcgcaggccgggcggcgtcgcgccacccacggagggcccagcggccgtgcaggacggctgtctgctgccagtctttcgactcgtcgctgctcgacgagccatagtcggccccgccgccgacggcattaccgagcccgtactgctgctgggcgacgcgagtcgggtagagcgagccgccggcaacgggagcttgggcgaagccgccggctgcggagtaaggtgatgtcgcggctgtcggtgctggcggccgggctgagggatagagcggctgattcggcggtgcggcctgaggagcacgacggcgcatgtttagacgatgaactgggtgtgaggaagatctggcgaggccggagggggagaagatgctggtcggagggagagcggtctgcccgcccagccaagctaatcatctctctcgcccttgcctccgctggacagtcacccctctctctacagcctcgccctcttcatctcccagctcgcacagactgctccgctcgccatgggaaacacgccttcgtcctcgtcaggctccttttcgcccggcttcaagggactgcacgtcctccgcgtcgccgagcactcacccgcgcaggacgccggcatcgagccctgtgcgtcgccctggcctccctctagccctgaagcccagtcatgagctggtccaggagctgacccgagactcatttgatcgactccagacttcgactacatcgtcggcatcgacggcgtcgagaccgttcgtcctgccatgctaccggcttggcggcctcgcttaggcaacgcgtctcgctccggcagctgacagcttgttccttcattcgttccttcgctccatcgttacctcggtcgcgcaacgcacgcacgatctcgcctgcgtatcccctacatgtgtattgttgtgacgttgtatgccacctcggcttccctctacggcacgcgccgctgccctcctatctcgctcgacgcgtcgaccgatcacctcaggacctgtcgcccgagtcgctcgtcacgacagtcgagacgtacgagtcgcggccgctctcgctcctgatctactcgtcaaaacgacaggcgacgcggtccatcacgctcgtaccgtccaggacgtggtcgacggcagtcccgtccggaccggcaccggtcaagggccacgcccggcacgagagcgagatgagcgacggtggggcgagcctgctcgggctcagcctgcgcttttgcacgcctgagaaggcgctcgagaatgtctggcacgttctcgagatcctcgaggactcgccggccgagagcgctggtgcgttgcggcgcgatgggagaccaggcacggtcgacactgacgctcgccctcttcattcaggactcgtcccttacggagactggatcattggctgggccgggggcgtcctcaaggacgagaatgacttttacgacgtcgtcgagggtcacgtcgaccagccgctgcggctctacgtctactcgtacgacttcgagtgcgtccccgccgccgccgtcgtcatgagcctccctcgcactcagggactgacacccactcccttcctgcccgtacagcacgctgcgcgaggtcgtcctggtgccgaaccggcaatggggcggcgagggattgctcggctgcggcatcggctacggtctcctccatcggatcccaaagctacggccagaagaggaggaccaggcggggctcgcatcgaatggggccgagcgatgagatgacgcgtcgcctgactgctgcaagaaagaagaagccatcaagagcctgcggcggactacagtgggtgggcgttggaggggcggccccagggcggacgattaggaggcgggcccgaagtggtacaaggggacggaggcggagagacatggcagggaggtgttgcgcaggcaggcggagcgtagcggaccggtaacccaggagagaccagaaatcgggagaatggagggaagcggaagcgatcactgcttggcaatcatcgcgtcaatctccttcttgtgcttcttgacgatgacggtccggttgagtttctgagcggcggtgaccatgttgttctcgggctgaaggggagaggaggaggtcagccgatgaagaagcgtctggggcgcgtgtcgcggccgtctacttacgacccactcctcggagtcgaggatcatgccgccgatgagctcggggcccttgaagccagacttcttgccggtcgcgaggacctccttgaggacggcgccgacgacgtccttgttgccggcaagcttctcgagcgagtcgccctcgttgacggacgagatctcctggctcgagaggaagtggcggaggttggcctcgtgcagcgtcgcgatgccgatcggcttgctggcctccgagttggcgtagacggcgaggttgctgaggacttagggcgtagggcttggtcagacaaggcggcgctctcaagccagacggtgcgcctgtagggcctcgcaactcactgttggtgcccttgtacgtgctctcgagcttctcgagcgcgacgtactcgcccgagctcagcttgacgaggttcctgaggcggggagggtacacgttgtcagccagagatcttccaattaaataaaatattttaagaccctcacttgatgcggtcgatgagcgagagcgtgccgtccgagttccactgccctacgtcgcccgtcttgaaccagccgtcgacgaaagcctcggcgttttccttgtcccgccggtaatagccggaggttacactgccgccccggagcaggacttcgccctggggcggattgttgctgttgaggtagccggcctctttgtagtctatgggcgacgcaggcgggagggccgggtaagcgatgggtcaagtggcggaggatgggccaagggaccgagcaagccagccagcgacgaaccctggagtttgatctcgaccgacgggacggggacaccgacgctctcgtagcgccagaattcgggcatgaggatggcggccatgccgcacgtctcggtcaggccgtagccctgaaggacggtggcgagtgtcgtcgagaggaactcctgcgtcgccttgctgagggccgagccgccctgcaagcgatccaaaacgcgccacggacggcagaaggcgttagtcaagcagagcggcgcatcggccagagcaggagggggagagagcgcacgttcatgcagatgcggagccggccgccggtcacgtccttaatcttggagaagacgacggcgtcggccgggccggcgagcgcgggcacatgcttcttgagcgcgtaggcgaggttgaagacgcccttcgtaatcggcgaggcgccgttgatcttgccgacgatgcccttgcggatcgtctcaaagatggtggctagaggcagagaaaaaagggagcggtcagagacgacgcaagctcgagcctcgcagcagtgaccgcgcagcaggacgcacggacgccgacgatgatcgagggagcgtaggccttgaggtcgcccgagcagttgcggacgctggcgtcggtcagcgtcttcgttccgccgtagccgacggtgatgcccatggtgtagaaggtgagctcgacgagcatctcgagaatgtgcgacagcggaaggaaggcgaggaacgtgtcctgctggttgacgacatctttgaggagtgtcgtcgtcgcgccgagcgagcaaatgatgttgttgtgcgtcaggatgacgcccttgggcgcgccagtcgagcccgaggtgtacatgatgcaaaagacgtcgtcccgcttcggcatcttggtcaggtcggccggcgacgtcttgccgctctggcggagctcgtcaatgtgaagcagcttgccgccgcgcgactcgacgacgtcgcggatggtcgtcagcagcgactgccggggaaaaagggaagcaggcagccgagtcagtcttttaaagggaggtcctagactgacagccagagcgaacagcacgcacctcgtcctcgcacttgccgtcgtagacgacgtagcggacgtcttcacctccaccctcggcgtccttggcgtcgcccgtcttgccctcgtcgacacccttcttgcccttcttgaggacggtcgcgagcgtggacaggagggcggcgttggcgaacacggcctggacctcgggctccgtcagcgagtgggcgagtcctaatgggagcaacgcttctgttagcgagagcgcacgggcggcaaaagcgcgcgggctggatctcgccagacgcaccgctcgtgccaagcgtcgggtaggcggtcgtgatcggaagcagggcccgagcggcgccgtgcgcaaactgctgccagttcagcctgtccaagatcgatgcgaaaggaaagtcagagctgagcactcccgagcctggcggagaggcaggagagacttacgaagtgtcggcgtagatgctgacgcgcgagccctccttgaggccaaggttctttagcccggacgcaatctggcgtgcgtgacgggtcgtcctcgaggtcagcatctggaaagcagactgacgcgttgacaaaacagtcacacgcacctcctcggttgccgtaaggatctccctgagaggaaggaggacgatgcgcagcaccggcggtcagcgtacggaagcaacaggatcaagggaggctgcaggcaacgcacttgaacgagacgtagcggtactctgacagggtgaagctgcaaggcggagcgcggaagggatcagctgccaaaccacagcaggagctcgccccggcgctgacaggggacgcacaacttccacgtcttcttctccttgacctccttgccctcgaccgtcttggtcacctccttctcctcctcgacgaccttgacgacctcacggaagccggacgcccgcttgtcgccgtagtgctcggcgaggaccgggaagactatgtgtgcgagggagcggataggaaggttgccggaggcgagggtcagctgccggtcaaacactcacgagccggctcccgcgcccaccacctgcccgggctgcttgacaccaggcagtcttccctcccccttgccttctgccatccgacgcagcgagctcgactaccgtctgcccagtcccgccagcccgtagaagcagcaactacagcagaggaggatcgcccggcggctgaggaggaaggggcgtgcgacgcaccatcggcgaccgtctggatctgagggaacttggccgggcccgtgacgagctccttgctcaggaacgaccgccggacggtcgggtcctcctgcttgatggaggccagcttggtcatgtaagaagcgtttctgcgatggaagagatggggtgagtgggatggggggatgatggtggatggtagggaaggaggcagggcagcggccaccccgagcttcggagggacgggtgagccaaggcggggctcagcagcttcgcccccgcagagaatgacgaactcttttgcccctgcgacgtgcctctttcactccatccaggaaccagacggcagacagcgctcatgtagagccggaaccaagtcgaccttaagcacaaatgatgagttctgcaagctcgacggcggcgagcgagacaggttgccgacgtcgaacgcgccgcgcccaaggacgaggacccgtgttcggcgagagcagactccgtgcctgcctggccaagaccaagcagagacgaggaacgacgtgcccctgctgacctcccctcgggagggcaggctttgacggcgcttcagatccgtcttgccgtccctctatatccttgaccccggctgatcgagtgcgattagctggccggagcagtctcctgcggccaggccccggatccgtagcgcgcagcctgccacgacgcgtcgacatcgaccgagggcctgaagcgcagctcgtgctcctcaaagacctcagacgtcttggtgatggcgaagccgagccggtcgaagagcgcgagactcttgtcgttcgacgtgccgatcttggcgataaaggaggtcggcgctgtcttgaggttcaactgggcgtagtgcagcctgcgccgtatcgatgtcgcccgtcagcctcataaattggtcttcggactttgtgaagagggacgtacaggagggacagagcttcgaacgctaggcccttgcgccgctggctaggctctggcaagaggggcggaaatcgtcagcgttcgccctccgatgcgactggcgtaacgcaacggacctgcaatcatgacctcacactcgaggtcggcagcgtcaccctcctcctcgggttcgtgaaggaagatgttgacgtcgcccgccatctgcgctgccgcaacctcccggcggacctcggcttccgacagcgaagcggtcggtgcaggagtcgagcccgcacgcgcgaggacgatgaaggtgagctctggcagcagtcggtcgcgaggtcagccaaacatgctcgaatgggacgcgagccttgcgccggacgtactatcgtcgtcgaggtgccacttgcctgcggagggatgggtcgcgcagctcgtcagcgctcggttggccggttgggtaaagcgcaggaaggcggctcactctgcatgttgtactcctcctccaggctcagaggctcgctcgccgtcgtctcaagcagctcaggactcttcatccactcgtgatagcgctggaggacgaaggacacgcgtcgcggtcagctccggtcgcgtcttggatagcaggcgaccgctcgaatcgatggccggctcctagaccggggacctcagacgcacagcaacgtgctccttcctgaagaccagccggccaggagtgtcgcatcgggtcagttaggctcggcttgagcagctgccgtaaggcttgagaggagctcaccggtagggcaccaggacgacgagctcgccgaccaggacggtcgcttcgttcagcctcatcgctcgtgctctcgttcagataggccttggtagagctagtgcgagcaaaaggtgagctggtccgaaacagagaaagtaggcgttggcctgctaaagcgagccttgccggaacgacttgtgcctgcggccgccgagacagacagcctcctcgtccgtgaccacgacctgccgtattcctctccatccgcttggtccgcatcaagccgcctgattcagctagtacctctgctccgagaacctgaagtcctccccacccactttcttcccccgttcgaacgcgcccggtgtcacgagaggatggcgtcgcatcaggccgaggctgcgacctcgcacgcgtccggcacggccagcgcgaccgaggagcacctccctcgggatgcacggctgatggctctcctgctcgcttccaaggtgcggatttagtccggcgctctggcagagcgagacggaaggctgacctggcatctattgtcgtcccactgccacagggcgtcgaggacacgacgccgcaggtcctccatcagctgctcgagttcgcccaccggtacacgaccgacatcttgctcgacgctctaacgtacaacgagcactcgggcaaggccggcaagattgatctcggcgacgtcgagctcgccgtccaggcgaaagtcaactgggaattcaaggagagcggcgagcgtgacgtgcgtcgggcctcgcgcctgggtgctctcgagcggcagagcgctgacttctcctgtcggcacgccctgctcgccagtacctgcatccgatagcgcagaagctcaactcgctcccgcttccacccgtgcccgagacggcctttgtccgactgccgcacccgaagcacatgctcacggcgcccaacttcaacctcctgcccaacaaggcgcgtccaagcgttttgtgccttccttcgtccgaatgggtgctgacgagcgagaccggatccgtggctgctcttagcctcctccagcatacggcccagacgaagactcgtccagcgatgacggctcggaggacgagtccgagcagggcggctcgctctcgtttggcacgccgcaggccgcctcttcgagtctaccgccgccgccgccgccggagccggaaggggagctcaacggcgatgccatgtcggacgaggacgaggacgacgaggacgacatgatgcagatcgtcgacattccgacgctgccgagcgccaacccgagcggcgtcggcgagaagcggccagcagaggacgacgacgacgacgacgacgacgactacgatgcgtgaggatgcgcgatgacccctttgacgacccagcggccagtctgcgaacgctgacggcggcgatccggaggtggcaggagagcacgggtggatcggacaggggcgcgcgcagaggacaacaagcgggtgcgcgaggtgttacaagaggagagaggcatcagacgctgcgattctggatgccgagctcctgctggacggcgctcagccgggtcttccaccgctcgacgtccttgaggctctcctcgatcgagcgaacttcctgctcgaggcccatctggtcctcgtcggtcccgatccgccggagctcccagtcgtcccggccgttgagcttgaggtggaggtcgtgatagcgcatgagcgacggccggtgcctgcatggtggcagcaagggcggcgtcagcagaggccgccggggggagcaaggcaaagacactcgcgaaatcgtaatgatggtgcagggcaggtccttagcggcctgatacatctggccctcgacgtcggtcgagacggcagacgtgcagtcgtcaaggacggcaaagcgcgggcggtggtaaaagacgcgggcgaacgccatacgctgcttctcgccgccactgaggacgtccttccattccttgcgggtctacgagagtcaggcgggattcggtgtcagccttcttcgctcaaggtcggaaaaaggggaccgcagcgcacttcgaagccgccctcgcgcttcggcaggtaggccaggtgagccttctcgaggatctcctgcgtgacattggagcgtggaatgtcagcggccggctcggggacaagacgatacaccagcggcacgcaccatcagctcctcgtcagtccggccgtgcgccttcatgtcggagagcgcatgcgggtagatgatctgatcgcgcagcgagcccaggctgaggtatggcctgcaaagtgttgtcgcaagtgtcgtcagcgtccgacaggcgccagcttcgaacgaatggacgcacttctgcgggacaaagaagaggtcgcctcgggccggcttggcaagcgagcctgaccagacgggccagaggccagccaggacgcgcgtgagggagctcttgccaacgccgttcgggccagtaatcaggatgtgatcgccctcctggcagcaggaaggaatgagcgcgagggtcagtctctgcgcggccaggcatgtcgagcggtgcgacccactccgatcgagacgtcgaggctcttaatgagctcctcgccaccccttgccgcaccggcgctgccaccggcgggggcgacgatcggtacgcccttaagctcaatcttgcgcacgccctcgagaacgcggcccgagacgcgagacatgtcgtagaagggctcgtcgagttccagctgcggcgggcgctcgttgaccgggtaggacgaggtgttgagcaggtgcagggtcgagattaggctgtacacccgagcggtgtggcccgacagctcggcgaggtccctgcaggatttggggcgcgagtgggtcagcacgcgcaaaaaagcgccggcagcgacgggagagaccaacttgtagctcagcataagtcgtcctccggcatcggcgagtgagatcagcagccgccggttcgagatataacctggtcggagggagacgtcagcgaagggcggcgtacgggagcccaaagctgggtgggcgcctcaccttctgtccggtcggcgacctggtggtcctcctcgtcgccgttgtttatgtcaccggccgtctctggcgagcgcttgccgacgaagactggagagggaggtcggtcagtgggcggtttgtctctgagccagaggcgacagacgcactcgggatcgacatcaacgcgtaaccggcggccgaccacatgtacttgataataaagtcctcggccatcgagtagccgacacggacccgggcgatgccctcccagtgcgccttgagccggctccaggcgccgtcgaggatgcccttctcgcggaggccgcccttgtagaacgatatctcctcggcgttgatgccgatccgggcgactgccgcgcggtactcgccctcgagccgagcaaggccagcggcgagcgtgccaaacgccggcgtgagcgagcgcaggagcgcggccgtcaggaagtagttgctgcaaagacgagggcaagagggcgtcagtcgtcaatcgtccgcgccgattcactgcggctcgtccggcgcaagacggacccgaagaggccgaccgtgcccatcggtccaagcgagctcgagagctgggcggtgaaaatgacgatgtcgagcacaggcttggcaatgttaccgtagagggccgagagcgtctcgcagaagcgggcgatgtcggtcgtgataaacctggccgacgaagtgagcgagcgggtcaatacgtttgccgggaggagaacagagctgactcctgcacagtcactcactggtctgcgccgccgccgacgccggtcccctttcggtcgtcagcgccgccaccttggccgccgggcgtcgcggcgagggcgccgaggccaagaccgaacttgtagaagttttgacgctccgagaggtaaaggtcgtgcgtgtagcgtgtcaggcgggttcggaaggcgagcgcaatcttggactggaggtagataatctgctccggcggggacggagtcaggcctcgggttttcagcgaggaaagggacgatctgtgacggaccatcgcgttcgtgtaagtgctcggaagggcgaggatgaaccaccacatgatgccgcgcgcaaaggccttcttgtcgtccgccttgaccaggtcacggacgatgcggccgtcgagccgggcgaccatgacgctcaggaccgtccgctggacgaggaacagcgtgtgcaagaggagcatcaaggtctcgcggcaccgccatctgacagagcagggcgcagtcgggatcagcatcgtctcgtcatctcttgatccagctcgcaggtgcgcacctcggcaggatgatcatcatgacggcgcgcagctgccgaaggaagtcgcggttgacgcccaccttggcaccggcggcgatggctgagaaggacgggacgtgcttggcaaacgtcgtcggcgggacgggtcggatcttgacctgcgctcagccaatcgaacgtatgtaaggtcagccatcgccatgccgatcaaggagctgccgacgagagagaccggccggtgatggggcacgagaagcaaagcgcaccttcgagacccggccgcggaaggggacgagcagcgtcctcgacttgccatcgagatcgcgcacgaactgcagcgggtgaggacgcagttagagctcctggtcagcgatagggccacatacagcaacctccgaggcgtcgggggtgccaaggaggaggcagctgagcgaaaccgagaggcgccgcactaggtcggcgctctccttctcgagcaccggcgtcgtcagcggcgtgagagcttcgatccgcttgcgctccctccggcgctctgccgactcgcggccggggatctggatgttgctcagcaggtcgacgaccggcgtcgtccggaggagaagcaaggcgaggaggagtgggccgagaagcttgcgccgcgcaagcgagagctcgaccagcgacggcgggatgagccggtcgagtagcgggtcgacagacgggcccatcgtcggtcgtgggccgtgctgagaatgctcaaggaaggaagataggcgggctctggagggtggtggtggacaggcaagacgacagctggactcggccatcgtctccctctgtcggcgcccggcccgcgatcttgccgcctgccggcgccttcagcactcacacgcgacgaattctcgaccaccgcaagcaagcgagcagcattgcgagactcatgccactcccagaaggcaagtctgtaggcagctcctaggacgtgccatgccgagggacccggactcaaggtcggtcgagggacaggcaggaacgcaatcacgtgccaaggctcgcgtaggccaagccaagtgctgcgaccgacgagtcgacactgcagtctaggaaggccagccgtccgacagcgccttcagagcggcagggacgacaacgaggtagccgttgtcgacgagcttcgtcgtcttctgggagcgagagcgtcggagatgggtcaaccgaggcctacgcacggcagtcgaaggcaacgccccggcccctcggcatcctctcgtctgacctgcggcgatgcgctgccttgcgaaacttcatgaggttgtaggagatactcatgtgctgacaacgggctgggaacgacttgcactcgggaggagggcattggtgaacgccgagacaaagggcgcagatcgaacttacatgggcgtgccgagcggaccgcagcagctcgaagcgagaaggactctgcaaaggctcccttggctcactctcgggacgatttcgaccaccgcgagccatcaaaccacgagggaggacgaggctttgccggcgatgcctctccggccagtcccagcggggcatcgccttggacgaggtgccagctcgggtcaggccagttggttgggcatgagtcttgatgatctgtccaatgtcagcttcttgtcagtctgtacgaagcctgctcgtgccaacctaggttagatgaaggctagcaaggccaagatggcgaggagcgagtcggcacctgggcgcagctccaaacctgcctgtgccgatgcctcggatcagcctacccttgcgaccagtcacagcgacgcgcggacccagataacagctcggcgcgatgcacacttcgtgggaaaggtcagggagcggggtcatctgccggtcgcagcgagaggtcagaaggagggtcgatgagtagggcgaggcgcaggaggacgctcgctgcctgccgacatccaccgcccttccttgccgccggctcgtcccttcctcaactcttgcagctcgacctcctcctagcaagaagcggctacacggagcgtcatggcgtccctgcagtctctcatcgacatggtacgtcggcggctggggttgtctgtcggtcgcatgtcggcggcctcgagctgacccctccgtccacccctctgaccgcgtcgggcagggcgcgacggcggcgatggcccgcgaggccctcaagcggaccaagggcgacctgatggaggctgccgtgagtcactacaggtgctctatggctctgcgtctgccgtcgaggccacagagatgctgaccttgagctctgaccaccggtcacaggagctcgtcttctcgggcgagctcgacggagttgcagacgacgagccggccgacgagccgacagtcggcggcgacatccagtgtttcgagggagggctttctgtcggcaggccgagcctacctgtgagtctcctttttgctagcaggctagtcgtcttgctctgcagggctcgccggttccggagacgcgcactgaccgccgtcgcccctgcccctccgactgtaacagacacctgagcccgatgacgacggtgaggacgacagtatggacgttgacgagcggcagacgagcgagcaggaagacagcgaggcgctggtcaccgaggacgaggacgacggcgagtacccgagcgacgtcgactcgtatgacgaaggtccgtccccttagcggtctggtcttactttgtttgcgctggctgacctcttgtctcctccttctcagccgactttgacatcgaggcgcccggcatcactggggccgaggacccttactcgggcatcttcttctcgacgtcgcgccgcgaacagctgatcgaggtcctgccgctgctctctgctgccgaccgagacggtgcctacgaggtgctctcgtttggcgagtggatgagtggctgccccgagaagggcgagcaggacttcctcttcaacctctggcgggacgagaccgagcacccggtcgtctgctcgtgcggctggaagcgggagcgctcgccgaccgacttcttcgccctgctcgtcagtgcctcctgtcggcgagttggctcgcattgaagctgacggccgcgcaaccgcttttccagcccaccttcccagagtatctcgccaaaatcgccggcgacgtccacctccagtgcccgtcgtgcagccgccggatctgcctcgcttgcggcgaggatgacgtcggcaacggcggcagctttgacgccgagggcatagacaagggcaagggtaaggacaaggcgatgtctgcgttcgggaccgacctcttccactgcgcaaagctccagggcgtcctgctcggcgtcggtgcgtccttcagtcaccgctccctctgccaccgccgccgctgccgcctctgacggccatctccttcttctcctgccaggcctcatcatggtctcgcgcctctttgcccagtcgtgggacgttctcgactacagcacgccgacggccttcctatatgctgccgaggcgtctggtgccacggatgaggccccgaagagcaagaagcgaaagacgacgacgtcgacgacgccgacggcctcaccctcggcctatttgacgtacggcaagggcaaggcggcgcctggcggcaccggctactctggcgcggctgtcgaagacgtacgtcttgggtcgccttgcactgtacgccagcggagcagctgctgacacaagatcacactcttctcaccagcgctcgggccagaagaaggcgctcgagctccagcaggagcgcgacacaaagctcgcccggctcctcaagcaagtgcgcggatttctgccgaaccttcggcgcgtcggaggcggcaagacgagcgactacctgccgcacccgacgaccttgacgaacgtccgccggcgcttcaacacggtcctcagtcggctgctcaagaacgactgtcggtcctggcttccactctgcttcgcgtgccagtctatccgtcccggctgaccctcctgaccattctctttccagccctcgccgacatgacgacgcggtccgagctctactttgaggtcttggactggctctttgtgcgtgtggcgacgagatctgcgtggcacgagccctgcagcgcctgaccctctttccctttcgaagtagacgctctcaaaccacgacgcgctgtcgtccggcatggccatgcctcagatgctgcgtgtctctgcgaccccgcgcgtcacgcagggcacctcgaccgcccgtgagcgtgtcgtcgtctacgagggcgcggactcgccccgggtcgcgctcgaaaatgtcgtcatccaggcgacggcggccgttaagggcatggagcgcacggcggctgtgccggtcgagggcgaggaggccgaagaggttccggtcgacgcagagtacgagaaggtccgcgacttttgccaacgcatcatcaagacgagcgaggacatcgaccgggcgcttaccgaccaaaagggtcagtctctggtcttcattgcgttcacccccagccgagttctggctgaccctccctttgcaggagccgactttgtcaagcgcctgcacgcctcgctcccgtatatcccgcgctcgtcgaccgtcacggcgcagcggcaggatgtcgagaccggtgcgacggacgaggagatccggcgcaattacgaggcgtgggccaagggctgccgcttcgagtactgcgacctgcgcgtgccgcagttggcaaagtcggacaagccggtcgcctaccggcagtcagtctgtcgtgcccttggcccgcatcgcacaaggctgatcgctcgcgttgttccctcccccctcagcgccttcacgagcgatgccgtcgccctctccggcaacaaccgtgcgtcgaaagttttcgaacgccctgccacctctagcttgccgctgacgctcctcgcccgcccaacccagtgccgaagcgctcgctcgcgattgcaaaggaactcgcgacccttgcgaccaatatccccgtcgcctttgacggctccattttgctccgggtcgacgaggaacgtgtcgacgtcatcaaggtgcgcgccgcgaagcgtccggtcgcaggcgcaagcttgtagagctgaccttcagaggatcgtcgcaggcgctcattatcggccctgccgatacgccctacgccaacggctgcttcatctttgacatttttttgccgatgaggtgcgttgacctgttgtgcagcctgctacgtcgcgtgctgactgaccctcccgccgcagctacaacacctcgccgcccaaggttaagacgatgacgaccaacggcggaacctaccggctcaatcccaacctctacgtgcgtccctgtgctgcttgtcggatcggttcggccgctgatgcgacgccacctttgcaggccgagggcaaggtctgcctctcgttgctcgggacgtggtccggccccggctgggtcgtcggcacctcgacgctcctccaggtgctcatctcgatccaggccatgatcctcaacgacgagccctatctgaatgagcccggctggtcgtcccaggccgggacggcggcctcaaaggcctacagcgcaaacgtccggcggatggtcgtcgctgacgccctgctcaacagcctcaagaggccgccgtacccttgtgcgtcccgcgggaaatcttcggaatgcgagtcgactgccgctgattttcccccacccgaacgcagtcgaagatgtcatccggacgcacttcaagctcaagtcaaaggtaatccaagcccagctcgacagctggctcgccgaagacgacggccgtgcgtccgacaaatctcgatatccgcgcctgcctccgtctttacgacacgctgacgtctcgcccgccccttctttgctcatcgaccaggccgcatctcgggccagaacatgggtacctatcaggagggcggcagtctgatgggtgcgtctcaacctctctccgctagccgagagacgaacgtgctgacctcgcttgctggctcgaacggaacggaaacgcagcgagcaacgtcgccgagctcaagcagctcctcggcaagctcgagcggggcgagtcgcttgatgcggccgacacggcgctgtcgacgtcgacctctgcggcggcggcgtcggacgcggccgccgcgggcgatctcgacgtcgactgaccgcaccagccacactctctctgtacgaatagaaccctcttgaattttctatccgccgccgccagccttcctttgccatcaacgacccgtacgaagcctcgaaatgtatgaccccccttccttcctcctgctgggcgttgcccgatgcctagaacctggagagggcgcttagtggcttggaaggcaaaagaggcatcaatcgtaccgccttcgcttgccatcgtcgccctctcttcccgccggcacagccggccgctccctgctccgcggccgctccctgaacccccggcgctcgtcatgctgcggatcgtcgctggtggcgcgccgccagggcgaacgctcccgactcctgctcctgctccgatggcgacgtaggcgcgagtcatcttctcgcccgtctgctcgattggaagcgtccggccggcggccactgcgctcgcggttgcgatcgttggcccggatgtctgtatgcccgccccagtcgcccctctgtccctgccccctgttgtctcacgcgcgagtgctccggcaacgaccgcgacgaccgcgagcaagaggtccgtcgcctttgagcgttaacgatcccgatggtagactgatgtgatccattcgtttacagagcgtccatcgctgccgacgaccaagcccgaccttctccccttatcgctacatcgacggccctcgctccatcgcacgagtcgcctccgccgccctctccctcgacgaacggcccgaacggccacgccgaggtgaccgagcatgcgctctctgtcgagaaggaggagactatggacgacgccccggccgacgagggctcggaggaaggcggcctaggccagaaggtcaagaaggtcctcgcgccggccagtaacctcgtcgccaacgcgcgcaaggccttcgaaggcaagccgagcacgtcaggtacgtggccgcttgtggtcggccgtctcgtacgagccatcgcctcatgtgagggagccctcgtcgagggagggaccgggcgctgctgccgcgcagcgcatcaactgagacgatgatcagacgaccgcgacagcgagcgataggtcgtcccaaactcaggctaaccctcgactctttcttgctcagcagcgaagcaggccgacctgccttccacagcttcgtcgcgccctaccgcaacgtcaaccgcgcggactgctgcgcctgccggcaccaagccgactgcggcctcccggccgacgggtgcgacctcaaccgtcgtacgcaagccggccgtcccccccgcccgtactacaacctccggcgctccaacgacaacgtccagccgcacgacgtcaacgatgactagcgctcggcctgttgtctcacgcgcgagtgctccggcaacgaccgcgacgaccgcgagcaagaggtccgtcgcctttgagcgttaacgatcccgatggtagactgatgtgatccattcgtttacagagcgtccatgcttccaccctccttcactcgcgcacctggtggcgcggcacacgcgcgcaccgttagcgccgcctcctttgccgtgcgacgcaccggcccctcaccggtgccctcggccgccagcaacggcaaggagcaggcaatccctcacgctttatctgccgccgcccgccgagcgtctgccgctcctcgcctcggtgcgcccgtttcgaccggtgtaaagcgagccctacctgcgaccagtgcgccggtggccactgcgcgtcccggacacgcaaggcagagcctgtcggtcagctcggcccctcggaccaatgctggcgcaactcggccgcttgaccgcgccttccccggcaaggcggctggcttgagcggcaaggtgtctgtcgcaggcgccaagcggggacgtcaggagctggaggacaaggtgcgcctgccttgattggggatctattttgaccccagggctgattgcaattggctctgcagatcgccgggctcgagtcggctctggcagccgcgcagaagatcattgaggagcgctcggcgccggctcctcttggaaaacaggccaaggacgaatcggaggtcgtcgccgctctccgcgaggctctcgcatcgacccgggccgaacttgacgagctgatggcgacgatccccaagtcggacgacttcgagcgcatccgcggccagctggcggacaaggagacagagctcgctactctgcgcgatgagctcgagaaggacgtcgagaagtcgcgcaacgagctcgataccgttcgcgagcttcttgacaacgagcgcaagacgcgtgccgaggacgagaataaacttcaaaccacgctgtgcgttgagccaagcaccatattgctcgagtctgcagtctaaccgagcgccccttgtactcctcagttcctctctccaggcccagcacgagactctgcaggtagagctcaccgctcacaaagacgggaagaccgacagcgactcgcttgtcgagacgctgcagcagaagattgacaaccttgagggccagatcgccgaggcgactaaccaggcccgctcgcccgccgactgtcacgaggcctcgcagagggagctgacggtgagcagagtcgacttcgttcaacgactgttcgtaagaacgacgatttacgccgctaccacgacactttctataccgctcaggaggcgctcaaggcggcaacggacgagacccaaactacgaacgcagagctgaagaaggtcaaagcggagtttatcgtacgttcagtctttgcgcccccgcccattgcgctcgtccgtcgtctgaccgcctgctgtgctaaatttcaattcccttcaggccatccgagacgaggctgagaacctccgtcgctctcaatcgagcctcgtcgatgagctccaagcccggatccagcagctggaagccgacgtggacgctgcccgcggccagagcgagagctacaacgcaagccgcgatcaggccttgtccgacctcaaaggcgctcaccaggtcgcgctctcaaaagctctcgccgcggcgactgccgagcacgatcagctccggacccaaagcaaggtgcgctccttgtgaacctctagccccgtgctcctcattttctgacgcgatccccggtcgtcacagagccagctcgacgaggcactcgagcgcctgactgctgcccacgagcaggagctacagcagcttcgtgactctcaggccgcttccctggagcaggctatcgctgcggcgcaggttgatgcgacgactacgtcagaggccgagtgggcgacgaaggagcaattgattaagcaggagctcgacgctctcctcctcaggtcctcgaccgagtcggccgagaaggacaccttgattcagacgatcaaggccgacctcgaggtatgtcttccctttctcttttcctgccgcttgctgcgctgacccctcgcgcacggccctctggttcaggcactatcgagcaagcatcttgccgagctggaggctgtccgctcgtcccaggctctcgagctgactaagacgctcgagacggcgaagaacgaagccggcgcagagcactcgaaagagctttcgtcgctgcgaaaggagtatgaggtcaccatcgagcaactccggtgagcgtcttgattactctgtacatcgtcgaaccgcgcgctgacatgactctccaggacggcccacatgagcgaggtcgaagctctccagtcgagcctacagtcgatggagtcgtcgatgaagaccgagcacgccaaggagatttcgagcctgacactcgacctccagagtgagcattgcttctgctctgacgaaatcactgaacaacgacgctgaccgcaactgctctttccttagcgcaccgcgaggacatcactcgggcgaagcaggacgcaacggcgcaggatggcgagctgcaggccctccgcgagcagatcaacgccgtcgttgccgaacacaacgccgctcgacaggcaacggcgcccgcgacggacaacttggccgctgagcagctccaccgtaccatctccgagctgcgtgaggagcttgaatctcaccaggagtcggcccacctcaccaaggcgagcctcgtccagcagttagagatgctctccgagaaccgcgagaaggacctcgaagaggcgtcggtcgctcgcgtccaggaggttgaggcggtcaagcgcaccgctgaagaagcgcagaccaccagccgtgcagaggtccaagccctgcaccggcagctcgacgaggagcgtgagcacaagaacaagggtgcgtttacccgctcgatcgccagacctgccgtcaccaaactcatactcttcctcgatgcagctctcgctcgggtcgccgaacatcgcacgccaccgagcagtccgcgcagcggcgtcgatacgctcggctcgccgatgaccaagatgcacgaggcccatacgcgcaagtgaatagcgcgacagctggacctttttctccttcgattgtgcgctgaccttgtcttctccccgaacctgcagggtcgccgagctcgaagcgtcagtccactaggcgactttttccggcacggagttacgctgaccaagcttaattgcgcttcgactatccagtgagatcacgcaattgaagcagaaagccaacgaggagtcggccctcctcgtcaaagtccaggaggaggcgtcgagcaaggtgagcaccgtggaggctgggtcgtctggtgtcgcgtgcgagtcgctgacgcaaccgtgtgtactcctctcaggcgctcgaggtcaccttcctccagaagcaggccgacgccgatggcgagctcatcttggcgctcgaggaggagcagaaacgtcttgcagacgaaatcgagcgcgcgacgttggccgacacgttctgaccgcccatctcttcagaagcgacgcccctttgttagtctctgggcgcccgctgtcgctgtgtcacgagacctaatcacttcgccttcgtttttcgctacagacgaaccctttgacgaccgtctacccgcctcattctgatttcgatgaaccctctacctctttgactgcttctgccttgagaaatctctcggtcgaagcagcacgggccagggcagaagtcatgcactgattccggttacctcggcctcttcccagaccgcgctcaggctcggacgccgtgcaggctcttgctcgaaggagtcgccaccgtcctcgtctaggctggcaaagctgtcgtcctctggggcgccgtgctcggcgtcaaagctctccccgagagcttggccgtcgtcctcggcgtaactctctctctcggcgaatgtttcgccgtcgggcaatggctcaaggccgtcgtcgtctagcgcgtcgtcccgcgcttcgaagacgagcagaaacttgccgtcgcccctggcggcgccgacactggaggagccgtcgtcggtcagaagaattgattcgccattgggcgaataagcgattcccgtcgcatcgaagggctctgtcgggcgtccgtagcacgagggtcagcgttggagggaagatgaacagagaagggcgcggacgaacggttcggaattccgatgcactctgctaggccgccgacggcttcggttccatcctcgtcctcggtcacccagtcgccactccagctgaagaggccgccggtgccgcaaacccagccgagccgcctcggatgcagcggatgccactcgacgtcgcgcacaggccggctcatgagcaggacggtgacacccttgtcctttgcgcccctctcgagagggaaaccgtagatgaggaggacgcagggcgcattcgcgtgctggacgaggaggagggtgccgtcgaggttccacctgaggagtgagacgcccattacaggcggcgacgccttgacatccgggcgagtgtaggagatggactgcggtggcctcaaagaaaggactgtcgaggtgagaggatccagtgcagggatgtaggtcagcgagcgcgcaacgcgcggcaggccaagaattaagcagcgcacaagggatgatgccgcggttcatggtcgactcgatccagtctggcggctcctgccagatattctgattgcgttgagcatagtcagttaacgagcgcagactgacgaacggaagttgactgacggcattcagaggggtcgcccgcaacggctcgagcgtgagaatggttgaccattcgcgatcgtcaagtaggcggatctagagagatacagtctgcgatcagctccagacgcccgacgcctaatgcacacaggagcccgacgaaccttgccgtcccagcttgcgacagccagccagcctccgcctggacgccactcggctgatcggacgccgaggccgatgctgctccactcggactgcccctcacgtccgggcggcgggaggctcaaaattggccgagccatcggaggaaggtgaatcgacagggcgtactcgagggcgtgcgcaaacatggcaaagtacggcttgataggcgaaggcgagacggcaaggccgactatcgggtacggggccggcacgcgctgcggaaggacagagggttcacgtcagccctgcatcggccggatgaaggacgcggctggcactcaccgacaggagactgaaggccaagagcgagtcatagacggcgactgagtctttagagttgtgacgctcggcgatgtagaggtagcggttgtcgaccgaccattgatgcagtcgggtcggctggcccgcgggcgaagccgacgcgactctcggattcaggatgacgagccggtggtccgagttggtgagcgagtagatcgtgacgcgcagctgagcatagcagaggtaaagctcaggttagaccagtctgtcgatggcagccgtctcgcagggctcccgtcgacgacgcaccccgagctcggaccacgctagcagcgtcgtcttgccctcgcctggcatgctagacggcgcccactcgacccttgacagccgctcaacaccgccgtgcagggtcgcctcgagcccgtcgccgtcaacgagcgagccgagctggaagacgtacgcgacgttctgccgggcgcagacggcgaggatgcgctccgaatcggggctgaagctcaggcccgtgatctcctgctgtcgctcagccaagctccccccggctgcattcggagtagtaggcgacgccgtccggcgtgagagagattcagccggtgacggaggaggagagagcggtgggagctcgaacgactgaaggacctgaagcgaaagcgagtggcggatgatgatgcgactccggtgggtcgtcgccaggaaggtcgagcccggagagaagagcggctgctgctgtgacgaggtcggatagaggtcggtgaagtccatcgatcctcgagaggagccttcggcaaggaggctgggctgttctggaggtgtcgagtcgcaggttcaagagtggtcggtgcttccaggcaaccggagggtgtcgcccgcgggcgcgacggaggacgcgacgcgtcatgcgtcggaagtgttgactgctagccgggacagtcgcttcttgccagcagatccccaccctggtcaagtcgactaaaggcatgacatgctatcaagtcaagcccgccagcgccttctcgacgccctcgagcgcaaaggtgaccgtctcccaagcggcgtcgctttcctcgccctcgtgcgactcctcctcgtcctccccgctggccactgcgtctggggtcgaatgcgagtgtctatgcgatgcatcgtgtgagtgcgagtggctgtgagatgttgagcagtgtttcgatgcggtggtggtcgcggaccgaggccgggcgttcagcgcacgacgaaggggctcgacccaagccgcctttcggtctgcgaccgcgtccggacggcggataccgctctggccggtgtgcgtcagcgaatgtcaggtcagacaggaggcgcgtcgtgctcggacggaagggacgcacctcgttgttgacgtcgcgagtgacgagcagcgcgtagatgtttagcgcgaggacgacagcgatagggcccggcccgcgaatccaagtctcgcccgagaggtcgtggtcgacgtcccaagcctctggcctctggcctgtagagaacggtaggctgaatacctctgtttcgagccgctcaaggttcgagccttgaagccaggcaagcgagcctgggctgacaatcagtccgcggaggaagtgtagaccggccggccggagcaaaggcgagtcgaagaagggcgacggcagaggaaagaaaaggtcgagagccttggtcggtgcgagcagactgggcgcaatcgacttcgacaggagagcaaacagggccttgcgcgtctgcggatccgggtcggcggccagcagcgggatgtagacgcgccagatctgcggcacgagccggatgtactcctcggtggcggcctctgcagcgtctgttgcgagggatttgagaagcgaccagacgaagttggaggcagcaatggccgtatcgctggccaacggaccgtcgacgagcgtcctcaggccgatccgagcgtccgccggtgacagactcggcggcgtgttggaaagcaggatgagaccaaaatgtgcaagcttgtcggatgagaggagaccaagagtcttgaaagtttggccttcatcggtcggaagcagacgatcggctgcggcctgcagtaaaagcgtcagcccgactgtttcagtcgaaaaggatcgaatacgagacctacagcaatctcgtccagcccctctggccagtcgccgaggcctggcaagctcttgcgtccgatcgactgagccattgctggtgggatgccctgcaaactcgagacgcgctcaatcgaccggaggttgaggcccggccggaggcgaacaatcgtgtcgctgaggatgccgaggagcagcggctggagaggaagaattggctcagcgaaagcaggtcagatgcgacaccgggtgttgaggacgtaccgtctgctcgcccttcaacgaccagtcgtccttgtcggtttgcgcccactcgtgaacggcagcaacgagtcgcgtgacggcgagcgcgacctcgcgacaaagaccgaccggaggccgatgcgaggcgaagcgagaaacggccggtcggagtagcgacgacaggtgcagcaccgtcggcagcgccttgcggcccctcatctgcggaacgcgcagggcgagcaggcgaacaagcgttgggagctgcgcgtcgagcggagcgggcgggtcgtcggcctcgtcggcgaccgactcctcctctgagtccgactcgcttgtgtatgaggcatcgtcggcaacagcagaggcggcctggtgcccgccttcgtcgtcgtcggtaccgtcgtcatcagcgctggagtcccggccgtctgctcctagcgggcgctcgacctcgagcagatcctcgatctgctcgccgacagcgaggatgacttctcgagggctcgcgaagcctccgagtccttcgacgatgatccgctgtgcgagctcggctacatcagaaggccggttgaggagcggtgcaaggacgggcagcagctcgagcgagctctcctcgaaagtcgagcgctgcatcaggcgagccagagcaggaccgtcaatttcgatggcgcgccgctactgagctcgtactgaccattctagagacccgatcttcgtccgagcaaccttcggtcaggacctcccagaggctctgcaatgaggcggccgtgctggcgtcagagtcgatctcttcgagcgtggtgatgaagatggcggcgaggttgagctgtgtcggggaggcggccaagagggaaaggccgtcgatctcggctggcatgctgtccattgcggttatcctctgcgtggccgaaggagactgggaagaggttgtggtcaagcgctcgacatgagcacctgcccgactccgctcgagctcggcacccgcagcagcaccggtcggccggcgcctttcgctcagcctcgtctctgctcctgaacggccatcaacgagcagaccaacgccgagatcgcagacactcctgagcagattcgcatcggacattcgtcgacgaggtgcgagtacagtgctgccgagaggagcccagcagcttctctgtcgtccggtcgcgactgactttgacctcgcacgtacagacgatggcagtctctctctcgacgcttctgccacccgacacggctggaaacgtgccaggcgacacgctcccgctcgcgccgtcgtcagtcgccttccttggtcggctgccggcctcagcgcccatccacgtcgccctgggcgcggtcgacgccgctacggccgccggcgacgaagactcggttgccgtcatcttggcgaggagtggcagcgagtgggtctcggccctcttgagcgacggcaagggctcagacggcgatgcctggttctcagccgacggcgggagggcaggtgtgatacgcagagcgagccgagtcgtcgtgcgtctcccctgtcgcgctcgtcgtcactgcgcggacgtgccgctcgacgatgtcatcggctagtctgacattttgctctcgttccgacaggtcaagtacgtgccgacactcgcgcacctgtcgctcttcctctcgcttctccactacgacgcgcacgcggccgggtcggacgctcaccccgcacggctggagcagcgtccgtctgtcatcatcttgcacgagctctcgtcgttcttcgtcaacggggagacaacggagccatacgacgaaccgctcggcgcacctctaactgaggagcacaagtggaccgtcaagccgaggtgcgtctgtgcacgaagcggagcgtcttggctcgcatgctgattcggtcatgcgctcctttcgtacgacagcgcaactgtctcatcctttgccctgccgctctccctcgcgttgacgaccgtcagcaacctcaacgcgtcacttgctaagaaaggtctgccgccttcacagctcgtcttgctcgacaatctcgctggcgaggcgacgctcccgatcctgcccgttcgcgacaacggccgcaatggacccgacctttcggcacgggcaatggtcgaacgtctcgtcgattggaccgccataatcgaagagggtgcgaagcccgacagctggcctcatctttcggacccgatctgaccccgtgagcttgcttcccgcgcctcgcagtcgaagatgacgcatcctatgcggtcgagcgcgtccaccacattgtgcttccagaagcgccgtcgaagggccaacgttcgacggtgcgcaaggcgtcgttccgcgatgaacttaacgagtcggccaaccgacggcgggcgaacgacgagggccgcggcttctaccgctggctctagtcgagcggcaatctggcaactcccgcgtgaaggtgagcgcgatttgctctggcctgtcggctccgaccgttggtctgatctgacaacggaccacgtcgctcttcgtccttctctaccagctctgcagtcgggacagtcgctaaccagctcgctcgctctgcctcatcccgccctcgacccctccgcagaccgactcagccaaggtcctccttggcctcagcacggcgtcgctcgtcattgcaccgctacacgcaagctgtcagacgctacccgtcatcacaaatttcatcgcctcgccgcggcgagcagggctaccgacgcgctcgcccctttgatgtggtcctgcacgcgctagcgctctcgacttgtttggcgcgcgtccccgaccgtccccggccaagccccggcatctcccccgccggtcgatttcggaggcgggaggcctggagggcgcggctgatgcgcacacagtggatcggccccgtcggccggcgaggcagactcttcggtaggctgcagctcagcactcagtaggacgtcgcagagggactggagagtggcagctgttgctggcagatggctccgtgagtcttgactggcctgaggaagcacagcgtccgggctgacctatttccaccggccaagaccgaagagggcggagaccacggtcgcgggcaagttgcgggatctcaacggctgccgccggcccttccgcgccgcttcgcctggtcgagtcagcacgccacaggcgccgaataaagctcctgaagccgccgttgcccgtccgtctcttcttccctcaccctccccttaccatttcctacaaacctgcccatcatgttctaaccctcgtctcgcgaacccagacccaacgaacagtgagtcctcaatctcgacctgcgcccttcgacgcagcctgtcaaccgtggctgactcccgatcccgtctgctcctgccgcccgcctcgctttcccttgtgcctcccgtcttcgcttctcatcagacccagcacaatccaacccgcccttcatgatacgccctcagacaccagattataacctacctccttgccacactccacccgagtgaccgtccaaatcaacgctagcaacttcaatcggtccaccgatcaccccccgatgtccttcgagagtgagttctctcggcgcgcgcaacgcattctctcgtcaaaagctgatcgagctccctcccgctggtcaggcctcttcacgatgaacgacgttgtcgccctctcccacatcaagctggccgcgctctcaagcggccagtcccgcgtcgatgcggccctcctccacaagtcgatccttatcgttaacgcgctcgaggtccaccacgccgcccgcttctaccaagaacgccggttcgcgtcccctccggttgccccgtcatcggaccctcttcctcagccggtgacgcccaagctcgcgccgatctccgaggacgaggagggcccgatcgacctcgacgacatctttctcgagcaggccgtcacctcgcccgagccggccgtttcgttcccggccgtcgtcgccgagatcagccacgtcgaggttgtcgaagtcggcgactccgacgacgactttgacttttcggacgatgacgacgacgacgacggtttcatgggcccgtcgacccagtcggtcgtctcctttacgacggcctcttcactggccttcgccctctcgtacccttcctcgtcgccgacgaacaacggcccggtctacgacgacttctcggacagagacgaggacgagattatcacaccgccccagccggacctcttggacgacttcaagggtgactgcgactttggcgcctacgatgcggacgagctcgaggctgtcgctggcctgtcgctctttggctcgtcggctcgtgtttgatgaacacccttctgcactgctctacactactctcttcctggggtcctctgcctcgcaacactcgcccccttttactccccgccctctccgctccactctgccactgatggtctaatgatcctgccatcgagcttcgtccgcctcagcaagctagctcagactcgagcacgccagcgtcaggttcatcatcatcgccatcagtcgatctggatcgtcagaactcgccgccgccgcgcttgacccgcagtcttggcgcgtccatcacgctcacccgcttgacaccctcgacccccttgagcgcggcaagcacgtccttctcgatctcggcccagcgcgcgccggcttggtcgaggccggcgacctggtagatgtgctcgtcggcgagggctccgactggcgcgacgtacgagacgggcaccgggtccgtcaggatcggcgggccgtcccgccgggtaaggcccaagctcgagggcgagtggggcgagagcgagacggagatgtaggtgttttggccgaaggagagctgtggaggcggcgccggcgctgcggaggatgagagtgacgacatctgcaggggaagctacggccgtcagtccgagtagagtcgtagctgagtgcagctatcgaagaaagaagctgtactcgaaaattgctcgagatcgtcaaaggtgcgagcgatggacggtcagagcgagcagagctgagctacgggagcagttgcggtcaaccaatagcgtcagcacacccgtcgtcgtgaacggcagacgaggaagtgcgtccacgcacaaactctgcttgagcagactacttggagtgccctgtagaagttcttaagagaggttgccggcgaggatgatggctaaaagggtgcggcccgacgacaagacggacgctgacctcattgacgtcggctcgcgtccgactccgaccagccttgccagacctgccagacccttcttccacccccagcctagatcaagatgcagatgcgagcatcttcagtcctccttgaggccgctgggccatccgtcttcggacgagcgacgcgtttggcccgggcggcacgtccagcagccctcgccgcaacctcatcctccaccttgcggccggcagcatcagcagcatcgtcgatcagacatcgagccggtccgacgatcttccgccgcttgtttgcttcgacgagctctcgtcggcaggatgtggaaggcgctgctccggcagcttggacctgtacgtgtctgcatgcgatctcaggcgtaggtcgagacgagctgacggcctccttgctcttcgatccggtcgcttccgagtcagccgactccaactactttgaaatcctcgacttgccggccgagggctcatttgatctcgacgaaggcacgctgaagcggatgttcctcctcaagagccgcctcgtgcaccctgacggcttcaagggcgcgagcgaggtgcggcctcgacctgctggctcgaagtgtttatctgcgtgaaagggcaactgctgacgttcaatcgcattcgtccctcctaccgacaggaagagtaccaggccgcccagcagcaatcggccttactcaacacggcatacgaggcgctcaagtcgcccttcagccgcgcgcagtatctggtgcgccactgtcatcgacgtcagccacgacgcctaggctcacgcccttatcggcggtcgctctcagctctcgttgcaggacattcatgtcaacgagacggacgccgtgtcggaccaggagctgctgattgacattatggacgcgcgcgaggcgatcgacgacgcccagtcggagcaggaggtcgaggcgctgcgtgaccagcatcgccgtgcgtccctcgagtcgaggcgagttgtactggacacgctcttctactgacgcctgctctgacacctgcttctcagagcgagcgaatgctacgatcaagggcttgtcgagtgccttcgaggagggcgacctgcagcgggcgcgcgacctcacgattgagcttcgctactggcttaacgtcgacacggccggcaaggacaagatccaccctaatgaatgagacgtcgagaagtcataattattccgggatcgtcaggacgtacttgccgacgttcgcgttggtctgtgcgagaaggcaaaagggaaggcagtcagcgcagagactcgttcgggtcgagccggctgcacgcagacgcaccgccatccggtcatgggcgtccttgatctgggtccaagggagctcctcgtgaactaggacctcgaagccgccctcgccgccggccttgaagagcggcaggcactccgcctcgaagcggcgcatcaggtcgctctggtaagcgacgtcgcgcgcgcggagcgtcgaccccttgatctcgagccgcttgtagatgaccttggcgagcgaggcattgaccttcgcgcccgagaggaagccgaggaggacgagccggccagtcggccggagcgagtcgaggttgtgctggaagtagtctcggccgatgaagtcgacaacgacatcgacgccgccatttgactcggccttgatcacctcggcaaagtcctcgtccttgtagcagacgcctcgggttggcgcatagtgcagcttgtcgagcgccgccagctttgcgggcgagccagccgtcgtaaagacgtgctcggccccaaaggccttggccatctggttgagggcgacgccgacgccgcccgcaccagcatggatcaagaccgactcgcctcgctcgaagccgccgacgaggaagagcgcctggtaggcagtgatgaagcactccaggatgcctgccgcttgcacatgggtcaggtgagtcggcttggcgagaaccatatccttgttgaggacgatgtactcggcgtaggctccgccgtaagcgagtccaaagacctcctggccagcctgccacttgccgccggtcgtgctgccgtcctcgacgacgcccgagaactcgacgccgagggtcgacggtgcctgcggcgggaccgggtacttgctgcaaaagtgataaaaggcagggcggtcagaagctgcgcacaggcaccaaagtacggctgaggagactcacccctcccgctgcagcagatccatcctgttcagaccgaatgctttgatctgtgccaggccgaggtagagcagcaggtcagctcggggtcggagccgaagtcgagctaggaccaaccttgacgagcacctcgccctcctccgggaccggccgctcgatctcgccaatgtgcagcgccgaagacggtcctacaccaccctcgatctggacggcctgcattacctgcgagcttcggaacggcgagcttgaaaaggcccggagctgggctgtcggaggcctggcggcggaggcggcggccgtcgagagactcaggccgtgactggccggtgcgactgacgggcgcagcagcgaggctgcctggcgggcgggccgagggatagccgagcgagtgagggcaagagcagacttcatcggggagggcgagatggcgttgagggtcaagcgtcgttgctgtgccgtctcgccgcgtcatgcctgcgagcgcagaggccgacaaccgtcccaagcttgacccggcgggccttactctgctgcagcaaacgtctatatggtctacctggctggtacatgaacagtcccactcgcatgccgtctcgacgggacgtgcagtgacttaggctgtggcggtcagtctgctgctgcgggctgcggtcggctttcctcaccgccgacacgaccacccgcctgggctcgttcacctccctcccctgtaccggccccggacgcgacaatgggcccgcctcgcccccgaccgtcatccccgacgacgctctttcgccagcagatcctcggccagtcctctcatcaacagcagcaacctcagcctccggacgctagcccacaagctctcccgatgcctctcagcgcgacgaccggcgccaggcgcccgccgctgccgccccccgccgtcgccgggtcatcgacctcgctctatgtgccgcccgctcggacaggcggccgagccctccgctcccgaccgaacgacgtcgacgagcttggcaggaagcccggcacggtcgaccttcctggcacgagctctgcttcggcctccaagcgacgccgggtggaagcgccggcggcagcggcggcgggcccgtcacggaggaggttcatcccgccgccaccactgcctcggccgggcgaggatccagacgaggaagctgagccggcttcagagtacagtgcgtgtcttgcttacatgtaccgctggccgttactcgggctgacgagctgcgtccctcctgcgcgcagactgtccggtatgcctctgcccgccgacccaagcgatcgtcacgccctgcggccacctgcgtacgtgccaccggcaatctgcccatcctgatcgctcgctcacccagacactgtatgttctcccagtctgcttcgcatgtctgcaaaagtcgctcgtgcgtcgaccgtccctctccctctgccagacgacgagcgctgaccggctctctgcttcgacaggcggccaacctcatccggactggccagaagccaaacccgctcctcgttcagggcgcagcggtaccaggctggatgacgccgctcaacctcgagggcgagtgccccgtttgtcgggttgcgctcccaggcgggctctttggccgggtcgaccgtcggccgggcaagactgcaggcgagggcgtccggcggatcgaggtcaagctcgtcgacgtccggccggttgaaccgccgattgagctcgagtagggcaacagccccttcctttatgaccaccctcgcacccgtcctcagacctgcactttgacgaccatttcatgactgtcccgacttgtgggccaagggagtcgagcgtgctgcgcgcggtcggccgtcgcctcttgtctctgaagttcggaggcgaaatccgacactgccgggcccttctgctgctgccagcagcgacccgcccaaaccctccaaccctccccttcacccccgtcgctcctttccatcgctctcttttctctctcgcaatgaaggtgcgtgcgactttggtcgatcgtcggccggccacgcatgctggcgcccagcttactcgagctgctacaagcacctcatcgtcgcgtcgagtcctgaccacaacgcgtctcaccttcttcgctcgcgctcccgcccgcgctcctcgcaacgttgcccgtctttcgccctctccgccctccaacacgctcgcgctcgctcgccaccgacatcgatccgcgctcgtcgtcttcgcctacgatgcctccgttcccgctgtcttgcccggctccaggctcttattctcgttggcggtacgtcgcgccgcccatctcagccccggacggctccctgaaaagcgcgtcggatccccatggtcttgacgctgatcacctgcctctcgtcgccgcacgcgctggatcgactgtttgcaggcttcggaacgcggctgcgtcctctcacgctcacgctgcccaagcccctcgtcgaatgtgcgttcccgatcgtctgctggcgccgccagagcgcgtccttagctcggcctctgctggcgcttgccgaccggcctctcttcgacgacggcagtcctaaccttcgtccttgcctcgtccctctggcagtctgcaacaaggccatgatgtgtgtccgaggagaagcgaggctcttgcacacgagcagatccgactgacgcactttcatccttgtccgcctcgcctgcgtagcctgcatcagatcgaggtgcggcccctgtcaccttccaagctgaatgtaccccagctgaccacgatccgctccgctctgctcgcaggccctcgtcaaggctggcgtcaccgacattgtcctcgccgtcaactaccggcccgaggtcatggtcgccatgctcaaggagacggaggccaaccttggcatcaagattacgttctcagtcgagagcgagccgctcggcaccggtgcgtcggctctgtgccatccgcttagcggccgtaacgagagggcccgactgacgctttgaacgacctgccgccagccggtcctcttgcgctcgctcgcgaggtcctcaagaaggacgactcgcccttcttcgtcctcaactcggacgtcacctgctcgtaccctttcgaggctttccggttcgtctcagcctgacatttcgctccaccgtcccgtcctgatcgtgctgctgttcgctcccttgcagcgactttcacatggcccacggcggcgagggaaccatcatggtgaccaaggtttctgagccatcggcctacggtgtcgtcgtccagaaggccaactcgtccgtcattgaccgcttcgtcgagaagcccgtcgagtttgtcggcaacaacatcaatgccggcatctacctcttcaacccgagcgtgctcgaccggatcgagctcaagccgacgtcaatcgagaaggagatcttcccggtcattgcctcagagggccagctccactcgtttgacctcgagggcttctggatggacgtcggccagcccaaggactacctgactggtccgtctcgtcgagagcagcggcgcctgcgcactgcatcagggactgaccgtgctgcgtccctccgatctgcaggcacttgcctctacctctcgcaccttacgtcgcagtcgtcgccgctgctcacggaccccaagcagccgtggatcaagggcggcaacgtcctcatcgaccctgtgcgctcttcttcaaggctcgactgtgccgtgctcgccttgctgaccgcctttcgcttgctcactgtcagacggccgaggttgacccgaccgcgcttatcggccccaacgtcgtcattggccccggctgcaaggttggcgctggcgtccgtttgcagcggtgtgtcatcatggccaatgccaacgtcaaggagcacgcttgggtcatgtcgtccatcatcggctggaattccagcgtcggccgctgggcccgcgtcgagaacatcaccgtcctcggcgacgacgtcacgatcaaggacgagctcctcatcaacggcgcctcggtccttcctcacaagagcgtacgtgctgcttgccctcctcccgcaggcgaacgtaacgctgaccttgtagtcgctgtcgccagatcgcctcgagcatcaccgagccccggatcgtcatgtagatggactcccttcttcttgcttgcatcaactgaggcccttttcatatcctcgtccgctccccatccccttgacttgctattagacccttcattcttggtgcgagcgtcgcgagacggtcagtttcctgcgcgagatggctcggctgccggctctcgggaaagagtggtgcagtctcagccgagaacgtcgtcctttttcacgcggtggccggcggccttcctagagcccatcgactcggggcttgccgctcgcaagtcgaggtcgggtcggcgagccgggcgtgcggatggtcggccgtgaggagcgtcagcaagttcgtctgaaacccgacgagacaagccgggctcaaacccaaatgaacgagggagatcgtcgcgcacactctcaatcgaaggggaccgcaggtgcgagaagggccagaggggacggcgcaccttcgtcacctgcacccagcacctcttctcgtcctcctctgttctccgtacttgctagccccgggcgaagggacgacgcgagacccggtcggacgacgctcttcgctgcttcgactctcagccaccggccgacccctttaccggctcctgtcggcctttcctttagcccaccaccgtcctctttcgccccactgctcgaccgtcgtcagctgagagtcgcgctcagggacctcgtacttcccgagggctcctccatccagcccttgcacgccaacatgccgttcagcggcgcgtcgccgacgccgaacgcggcccggctcggccggcaaggctctatctcgcaccgccagcggctcctgtcgacggcagccctctcggtcgacgaagagatccgtcgtcaagagggcggcggctttgccatcccgatggacagcaactcaccggtcgccggcggtcctatccgccgcctcaagaccgacgacacggaggccggcctgccgcttcaccgccggcgcggctcgctctctcgccaggcgcccgacctcaaccttcgaccaccgccagtcatcagctcggctgcccgagcagaagcggccccacctgcgccggtctcggtcgacctcccgccatcgccgtcgtcctcgacgcggacgttcacgcaggcctactcgctcgaccgcgctcatccgcccaggtcgcccctgtcgacgccgctgtctgagctgccggccgaggcactcgtcgaccctttcgagccggcgtcgacgagcttctttcctccctcgcccggcgattcggtgccagttggacccgttcctatctctctgccatccgtgctgcctgcgacggatgtggcggacgacgcggcaagcccatcccagcgcgtggtcccgaggctgcatctccgaacggcttctggcgccgacatcggccttccctcgattcagtcgctcccttcgctgccgcgagggccgagcggcttccgtctcggtcgtcggccgtcagtctctggcagcccgagcccgacgcgcgaagttttctggggcggtcaggccggcaccgcgaggaagagcagcgcagccgtcacgcctgtcggctccgacgacggccagtcgcctctcaccccgggcggctcagttcgaatccttcgccccttgccctcaccgcgcggcgaattcaacctggacacgggcaagatgctcaccgttcgaggtccatccctgtcgcagcggtgttcgcgtccgcttgacgccaatcgactaacacctttgccccgcctctcgccgaccatagctcgcgtcgcaacacccaaaggagagcgctcggccttcatcgatgcgacaaggtcctgtccgcctctacacagcccgctgccctcgcctctgtcctcgccaaccccggcccctcagtcagacttgcatgccgaccctccggccgagcaggacgacacagacgtcctcgcactagtgcaacggcaacctgccatcccggttgccgtcgctcaagggtcgccgcccgaaccgtcacgccggacgtccgtcttcagcttcacgtcgggctcgtccggcctgtcaacctcatcgagtgcgaccgccggcacgtcgtcggcgctggatacgccctcgttggtcgatcggtcgatccttgcttcgccaaagcctcacctgacggtctccaagcctcccactctccttccggtcgagggcgagccgctgaagccaactacaacaacagagacggccgagtcggaaccgctctccccgcttctagacggcctccgcagccgtcagaacgctgcgaggtccggcgaaagtcggaatggaggccttcgtcgctcatcgggagcgttgaagcttaatctgacggacaacgagcgatctgttaaaggaccgtcgaggtttcccacccttcttctcggcaacgttcgcgatgacgaggtacgactgtctccagcttcagactaggaagcctcgctgaaagctcatggctgttgctgtgctcgcccttatcgcagttggacgatctcctctcggcctgcccgtcgagcggccttctcacgagcgagtcgtctctttcgcgcaaatcgtcgggcccttcgctcgtcgccgacttgcgcaagagctcgacggcgtcctacatgtcgtttagcagcgttcgatccgagccgtttgcgtacgacgacggctggtccggaagcgacgacagcgacaacgagtcgatcccgatgccgaggccccggccgagcttcagtcggtcgagcagcaacctcgctcctccggtgccaattgtcctccggcggtcgtcagggatgggccttgcgccggcgctggcactggttacagcgggtctctcgcagtccgacatggtcgatgcttcgccgaaccggtcctcgtcgcttccggtcccactctcatccccgggctcatcgctccgttctttggactcggtgggcaccatccggccgctgtcgcagggcgaccctcgatcgtcggtctattcgacccgctcagagtccaactactttccctcgagcggggccggcagagctgcgcggccgtcgagcattttctctctcaatggcgacggcagcctcgtcacgcaggagggcaaggtgctgccgcggcccaagctcgaccaagcggacccttggggcgacgtcgagattgcctaccagtctggagttgaagcggcggcccaagcgcgcatctcaagcaaagggtcgcaggcgagtggatcatcgtccaggaacggctcgtcgagcggtcgcaagtgggaggaggcggccgaccgtctgcccgggcgcaaaaagcttctcgcccggcaggagagtgcggtaagcagcgctagcagccacagctcgtcctcgggcaaagctccagttgtcgagccatcgagggtggctcggccccctccgtctgcgatgaagatgccggcaccagcgccgatggcgtcagcccaggccgccacaacctctgcgaggcccatcccgatccgcaagacatcgtcgaccaaccagctacggtcgaccaccccgggctcaagcgcatccggagcaacgtcttctcgcctgccgtcgccagcgattaagaagtcgtactcgggcaacattccgcgtttccgctcgcccgccggatttgcaacgtcgtcgcccactgggctcaagcagccagtcagcctttcgacaatcgagcccctgcgcatcactcgtcctggcgcctcgtcaccgcagccaccagcagcaagtcccttggctgtgaaggacaagccgctcccggtgtcgccctcggttgggaatcgcttgtcgcctgcaccggcggcggacaacctgcggtctcggacgccattgcgctcgcagtcggaagatacgacccctacacagacgccagtagcatccgttggccgagaaagaacctcggagccctcgccgtcgaccgttcaggcggacgacgcccttcagagccaacctctagcggtcggtgccgacgtgcctctgtcgcccaggccggctttcggtccagcagcaggccgtcgcatgtcgaagcggccgtcagtgcccaaggcccgcccgccgccgccgatccagcatctcttctacgaggcccctcccctcccaccgctccccgccctccctgctgcgctggcgtcgcagccgcggtagccgcggttgcggaggtgcagcgccggtcgctgcatcttcccctcgatccctgtatcccatacttccatccatttgtggcctctccatgatagatgcaacggccattgacctgtacagcgcgggtggccaggcgacaggtgcacgagcggccttgtcttggtacgactcgatctgcctccgagcttctctgcggccgcggcgcgccctgccgccgacgttcctgtggctcgctcgacctcgctctcgacgccaaccacgacttgtcgcccaggatgactgcccagctccccccgaacctcctcaagctctttacgccgcggctgccgctgccctacgtcaagccggtcgggcccaactacgacaagcccaaggtcttcaagacccagggcgtcgccgccctcttcgaggagctcaagagcgacaccgctagcaaggagcgccagcggctcgagaccggcctcgaggaggagggcgagaccaaggaggagcctttcacacggaccgagatggagaagcgacgcatcaagaaggagcagaaggcaaaacagcgcgaagagtggaagaagaatgctgaggccagctgtccgtcgcccccacccctcgccgcctcccttgcatctcacgcgcctctggagctgaccgctttctgccattcccgctcttcagacaagccgctcgatgacccagaggctgttggagacccttacaagaccctcttcatctcgcggctggtgcgtggaccgactctagcccagacgcgcttggtcgagctcgatgccagatctcttgagctgaccgtccggcctcccttctgctctgctctcagtccaagaaggcgactgagcaggacctccgccgcgagttcgagatgtacggcgcaatcgagcgcgtccgcatcgtccgcaaccagaaggacaagagccgtggctacgccttcatcgtgtacgaacgcgagcgcgacatgaagggttcgtccgaaggtggcccgtcccttttgtagggcacgcactgaccaagcgctctcctgactttgtccgttgtagccgcctacaaggatgccgagcacattcccattgccggcaagaacatccgcgtcgacgtcgagcgcggccgcaccgtcaagggctggaagccagcgcgcatcggcggcggcctcggcggcaagcccaagccgatcgaccccaacgtcgtggggttcggcggtggcttcggctttggcggccggggtggcttcggtggtcgcggtggcttccggggcggctttggaggcggcggcggtggtttccgtggcggctacagcggtcctcctggaggtggcttccgcggcggcatgggtgcgtctgcttcgtccgagctgccggcgtgctgttccctcgctgacacgctacttttttttgctccaggcggcggaggtggcgggttccgtggcggctacggcgggggaggaggtgaccgaggtggctttggcggtcctcctggtggcggctttggcggcgaccgcggcggtcagtctctcgattcgtgtctgttcagatcttttaagcaagatgcgctgctaacggtctcgcttcccgacctctccctttgcaggcttccagccgaggggtggcccggacaacggcttcggtgctcgagcaggtcccggaccgagcccgagccgcggcggctacggcggcgattcgaggtacgttcgctctcctagactgatgctgggcgacgagagcgagattacgaggacgggcagggcttggttgaagaagaagatcggaatgcacgcacagcaaaaggacacgctgcccgcggcctcatcgccgcggcaacaggagaatatcaacccaggggcctcatgcttcctctgggcccgttccttcttctctcttggttccgcctctgcttcgtcttcctcattctccctgatcggccctcctcgacaatcacgatctctccctggtttgtctccccttgcttttgccttgctcaccctcttctccatcaaaaccccttctttccttctcgctctctcccgataactcaggggtggcggcatcggctaccagggcggcggcttcaacggccctctgggcggcggcggtcctccacctccgtcgtcaggcggctacggcggcggttcgtacggcgcacctcctgcagctggaccgcctaagcgcgagtacgacggcggcagtggtggcggctacgatagggacgacaagcggccgaggtactaaacgtcgtctttcatgtattcttcgtgctgctctcggccgtctcgccgctcgtatgagtgcagggaggcgatgggccgtcagtgcagcacccacacgggtacggtgaccgggcatgctttgggggggtcgtcaaaacccaagtgcgtggtcggctcccaccgctcgccgatttgatcgcgggaccgcaaatttgatgagagcagcacacgcgagttgtacgagattccgaagccgaagagagggaagagaaaggaaaggaaacgacccagcgggcgtgttgcacgcgccagtgcagccggggcactcgtcgcgcacgcaggcgcaagcactccttcctacgccatcgcgagagagaacagacaccgatcttcgtattcccaagccgagccgtcatatgccctcggcaaagacgctggtcctcgcagccccctcgacgtcgcgtgacgttgaaggcccctcccacccctccgaggcgggctcgaggtcgatcgacctgtatcggcccggccaaagccgtcgctccatgaagcgctctgcggtagccacgcccggtttgagaagagggcccaagatggagaacggagagaaagccgcaggcgagagaagaagcagacgacgacgcacgagacttgtcttcagtgcttcttgtccgccaggtggtcgcggaagatgccgtcgacgctcttgaacagcagatgggacgggatcgaccggatgactgtgagagaaacgggctcgggcggtcaacatcttgtgacagacaacgaacgaaggagattgggctcactctcggagacgcggtcgttaacctcagtcgatggcacgccagccctctcggccagctcgtacgtcagccgcagcatggcgagcacggccaggctgacgtggttttgcttagcagcgtagtgcgagttgggcgacgcggccgtcgcaagcggcccgatgaggctgctcggcgtcgcagggcccgtgccggccgtccgatcaccgcgcgtgaggcgaaggaggatctcgaaaatgttgtccatctcgcagaggtgctgcttgacaaagcgcctgcgttccttggcgctgccggccgtcgagttggttgcccagctgtcgagcgagttttggattgtcggcgtcagaggagcctgccgtgggcagagcatgccggaggccaatcgtcagccagaatagcctacagatggtggcctcgggaggcggtgaaggaacgcacgggctccgggtcgaggatctcaaacttgccgcgccagctcgagaccttcttgttgtcgaccttcatccggccaaagaggtcgttgagccagtcctcgacgaggccggtccgcacccatttcggctcgctcaagggccggtcctggtcgaggtaggcgacaatcttgaacgtctcgcacttgagggacgggtagggcgcggccgggtcagaatcagcagcgatgagcttgtgaacaggcggcgtccagccggccgaagggtcatcgacgccgtcccacatgtcgtcgagcgtgtcgaaggtgaccggcttgaacatgtcggtctcctcgtcgagctgctccatctacgtttcaagggagaaaggtcagctgctggaataaaacgtagctgacgatgaattggtactcacaagaacgccacggcagatgtcccaagtctgcgacacgccctcctcctcggtcttgacggcggcctcaggcccagatgtctgcgtcgcaggcgggaccgtcgtctccttgctcgattggccgctcgccgtttcctcgatcttggtgcgatcagccgtcagatccggcaggcccgtttggtcatcgtcaggagccgaggcaaccggcagctcctcctctgcaaccacctgggtcgcgccgttgatccctggcatctcagcctcggccgcctcgggctcgattgaagcgtccccaagtgtcggctccatctcgccagtaactgcagaggttgcggtcgcgggcacggccgcctcggcctcgattgcctcgactggcttgtcctcctcggtccccggctcgaccgccaggtcggccgacttgttccagcgaacggtaagctcgatcttgccctcggccctcgagatgcggacacgctcgatgacgtcagcatcgatgcaaattcgccgggtcgaccgctcgtacagaattgagatgcggtcgtcggacggctccggcccgcggtagaagaggtcgacgttacgtcccgtctcgcgagcgggcgtcgctcggactgaggccgatgcgccagcttcggacacgcttggggcgatcgagacgtcgcgctccttcttgacgggcgattgggcttccgaggcgggctcggtcgaggcagcggcggtggacgactcgtcagcgatggaggaggcgcctgcggccacggattggtcggcctgggccgactcgttgtcgggttcgactgagccgcgagccgagagcatagagacgtctcccgcagcgtcttcgacgggctcctccaccggcgggccagcggcgggggcagcagcgttgacgtcctccgcaagcgaggcaagcaggccttcaacgtcgtcctcggcctcagacttggacacgtccggcgcctcggccgtcacgttctcgacggcctccgatttgtcgatcgctgtcagtgtgtccgaaggcggctcttccttgagctcagtttggtcgacagactgagctgcatcgccgggcggcactacgccgtcgatcggctcctccttactcgcggagggctccgaagcagcagacaccggcgtcggctcggcggacggcttgacctcctgcttagcgagcatggccttcggaccggtcggcggggcgggcgtctctggcctgatgactggcaggggtgcccggaggccttcgatgccgccccgaccgcgcttctcgccgtggccctgaccggcgggtgagtcaaagtagatgcgcaggcggttgacgtcgcgcgtgacctgctcggccttgctcgtgttttccttgccgtgcgtcataaagtaggagcctcgctgctgtttggccgaggggcctgacgtgctggcggagggcgaagacgggccgtcctctgcgcaaggcgatgaaaggcaagggggtcagacgaggaaacacaggagaatgtcgaaggccaagacggaccttcgttgccgccctcagccttgcgcttgcggccgcccgagccctcggcctcgtcgtcacgctcgcgttcgcgctccggaacgaggccccacttccactcgagctcgggcacttcgaggccgacaatcttgaagtcggacagcgtcttcttctcctccttctccttcgatcgagccttgtcctgctgtgcttgcgaaggcgtcgagggctctttgggctgcctgcctgcgcgggccgcagctgggccgcgcggggcgtccgggacgtcgcgttgctggccgccgccgtaagcgcctcgtcctgcaaagaagtggcgagccactgtcagctagagtcgaacgagcacaatcgagcaagtctttgactcacctcggcccttgaaagctcctcggtcgcttcggggtgcgttcggcccgctgttgcgcgggcccgtcggcccattgggaggtgggctcgcccgcatgataccgcgaggcttgcctcggaagccattgactgagccatagccgtcgtcctcgtagccaaagccgccgcgcgagccctttgacccaatccggacggcattgctgccgcctcgtccgccgggaccgcgaggcatcgagccgtggtcgcggttgtcgccgccggcaaagtattcgctaccgccgccgccgttcgacgacgaggagggcccggcgaccatggacattggcgtggcgatcgtcatcgggttcgacggcaggccggccgacgaagggattgagatggtgcgcgaggccggtcctgcgccgccgccgggcccagcgagcggctgctggggtccgctgtcgaagcgcggccgtttggccggagggaagccctggtttggcgaaggatgaagcatgcccatcggctgctgaggtcccatgccacccatcggtggatgcgaggacgccgccgacggcggtcgcatcggcatcgcctgcggcccggccggcaggggacgtccctggccaaagccgccggctccaggcgtgtaaggcgagtagcctcccatcggctgcggcgtctgaggcgcttgcatcggccgggccgaaggatacgcttgagggccgaccgagggcgtgtaggcctgctggggaaccggctgggcgtaggccgccggaggccgaggctggatgcccatcgcctgcatgcccgggtaggcaggctgcgatgcgcccgggtagcctggcacaccgccgtatggcaactggggaacgaaactgccatacgctcccatctgaggagccgaggtcaaaggtcagtggcttgcaggccaaggcaaaagggccagcagactgacggcttgaggctgggcgtagggcgccggagcgggggcgtggcctcctgcctgagctccaacggcggccgccgcttgttgctgagcacgaaagaagcagacggaagagagagcagagggacgtcagtctgctgctcgtcctcgggctcggcgacggacgctcaggcggctcgcagaccgccagctgtcgagcagcgaaagagcttgctggagccttggccggttcgaagccgcttggcagacgcacctggtagtaggccgcccatgccgcagagtagtccggcgccggtgccgctggaggaggcatcgtaaggacgcttgcgctgcgagggtgagaagaggtgacggaaggaggtggcagacaagggggatgacagtcgcaaggcggctgtcggtcaggcctccaaacggcagcagagtcgtcgaagcgcagcggcgattcgcaatgtagctcgctctctccaagtcgcatgtcgccgcccgtcgctttcggcgaggacaggcagtgctcgtacgttcagaatcgcttcgccactgaaggcaagaagcacgggcctacggaaaagaaggtcggaaaagcgacatgtgatctgcgtctcgccatgaacctcgtcaagaccccctctcgacaattcactccaccacaaaccggccttcacctatagcaggccagtcgtccggtttaaaaggtggagagatctggagaaaagcagcagggcaaggtcagtaacgtgtcgaaggaagggccgagcagtgagagcaagagcaagagcaagagcaaggagggccggggttggttcagatccagtgtttatcgtctgcgcccaggcaaagtgccaggactaagcaacagcttctagttgatatttttatggtgaaggaagctcatcatgaaggaggagggaggtaaagaggagggaagagtcgagggaggacacaagggcggcgctcgaaaggatgaagactcaccagctaggacgggcggaggctttaaagccaggcctccgcatgcgccttcaccgccggctgagcaggagctcggcccaagcagcagaagggaaaatggtcgtcgtcagctgagagggagctggtcggagagacaaaaacgagtaaggggggggggacgaccgaaacttgctgttgcgagttcggtcgagcgagaaatccaaaaggccccggccgcccgcgcgcccgcgccggtcggccgcctcaacgacgcgacggagagctcaagtcgactgctcaagcagccgccctgttcctctctctcgaccaggcaccgaagcaaaaagtccaacgacgactagcagcctgtgagcttctctttcggccgacagagcctttttggagtcgctgtgtaaggcttcggcggctgacgccttccccctcccgcctgtcgctccctgcgcgcgtcgctcgacaggtccctttctctctcgctgtcacgcctcccgagcgacccaccaccggccaagctctacagctgctcagcatttactcgaagcaaacctcgactgatcagacccagtgctccacaagcgtgagtcgtgccagggacgcctgccgtactgccaattccgcactgaccgccgcctgcgcgccctttctgtcagtcgcgtcgcacgccctccctcaccttcctcgcccgagtgccttaccgacctgatcgctgcgccgcactgagaccgttcttggcctaggtgagcctagctctctcatctcccgtcagtgctcacttctcatctactgacctctgacaacgattgttcgcattggcccaggtttctcccgcggtccatgcctaccgagcgacgccggagcgggcgcacctcgcttcctacgctcgcctctcagagaccagtttcgggttctcccattccgcctgccaccgagtgctctgccagacccagcttgacgtctccctcgcgagtccgtgcggccgaccagacggccgaccggctgcgctccatcctctcgccgcccaagggcaccaacgaggcgtcgcccaactcgggccgtcggctgcagttcaacgactcgatcgaagctcgaacctttgcggtcggtgaccgggctagccctggtgcgccggctggtcggcgagtcgcgcatccatcgcctgccagcaagcgcaagagctgggaagcggcggaggaagtcgagagctctgcgccggtcgcgtccggatctcaatcggccggcttgccccctgcccagccttcgcggtcgaagcggtcacgaccctcggacccgcggcctcagcctctgcaaaggctggccgatgcttcgctgaaggccctgccgactccgccgccgtccgagccatcgctgtcgtcagctgcggttgggaagaaggcatcggtctcgccgccagctctgccgacaccgtcggcgtccaccacacccgagcaacctgaggagagggcgccggcgtcccgtgctgccgtgaggaaagcctctgccgaatcggacgacgagccctcttcggccagttcgacgtctgaggacgatggcaaggctcggcgtcgctcgcgtcagaagcagggccgcaagacggtcgcgaaagcgttggctgtgagccgctctaagtcggcgctgacgagctacgtcaagcggttcgcgatgcctgagttgttcggcccatccgcggacaaggtctacctcgtcgagggcctctttacgaaccgatcgatcgacacacgcttccctggcttcccgaacggcatcgacaagacgggcaaaccggcgccgtacaagccggcggcgctcgcggccgtcctcatggacgccgaggtcaagccgactctgaccgccgccggcagcaagctggccaagacgcggccgtccaaggcgtgggtcaccatcctgccggacggcacccagatcgagggcaagttaccgcgacatgcggacacgcagtcatcccagccccaaccggctgccaaggctaagccagcgatcggccgcaaaggtcgttacgtgtgggtgacggagctccccgacggctcgacggtcgacggcctgctgccaatctcgaaagacgaggagagcgatgaggccgacgaaccagaagctgaggaggaggaggttgaagacgccatcctcgcaactgccgagtcggaccaggaagagggagacgaggcgctcatcgtctctcggacgacgcgctcccgatctggccgcatcagtctcccggccacagtcacaacgcaggcggccaattcgacgtttgagccattctcgggccgactgcgtgccaggcgttcgctgcccggcccggcggcgtcgccggcccccagcgaggtcgcacctagacggcggggcaaggccgcagccagagacagtgaggaagtcgagacggggcccgagctggtcgagtcgcccttcgtcttcccgctgccgacgacgttccgggacgcgcccgacatcttgaacgacagccggccgttccagctcacgcacgacatcgtctgggagtgggagaacggcggtctcgagcagcagaagaagcccaagccattcaagacgatctcgaagagtgcgttttcctctaccgctttgcttccggcgctcggtcgtcctggctgacttgttcctcctcccggttgctcagacgtctttccttctcgcgctcgcgacctcgccgtcgcatcaatttgcgactgcaagccgccaccgccggagtcggacgagatgggctgcggcgacacgtgcatcaaccgggcgcttcagtacctctgctcacccaagacgtgcccttgcggcgagatgtgctctaacaagtcgctcttcaagcggtcgacgccgagcctcaaggtcttctgggtgcgctggctcactggcgacgccgattgcctcgagaggtctgacctctgatcactgctctcttgctcctccagaccggctcgcgaggctttgggctcaaggcgatggaggaaattcctcggggcgagttcgtgctcgattaccgcggcgaggtgcgctgctctattctgctttgccgggcaggcggtcgactgaccactttcagcctccgccaggtcatcgagctctctgagtactacgcgcggatccagaccgtctacaagggccgccaggactactacgccctcgagtacggcgaaggcgaggttctcgactcgggcatgaagggcaacattgcccgcttcatcaaccgttcgtcgcctgattggcgcaagtcatcgccctcgtacctatgctgattgcctcgctttcctccgtctctcagatggctgcgcgcccaacctacgcgtgcacaagtacacgaccctcggcgagggcgtcgaggagtatgaggtcggcttctgggcaacgcgccacatctcgaagggcgaggaggttcgtttgggcccggcacttgatgctcacaggggctcgttgctgacatctctccccgccgacagcttttctacgactacaacgtgcgctaccgctctgctgatagctcctcgagcgtcatcggaagctaaccttcgcatctacctcgcagtttgactcgttcgcgacacgcactgcggctgccgccatgaccaacgccccactgccggtcgtgaccgaggctcccactcagaagggcaagaagggcaaggctgctgcagcagccgagcccgaggtccccgaggccggcaacggccggcagcggtgcaactgcggtgccgacgtctgcaccggctggatcggagggtgcgtcccggccgattgtctgactgcggcgcgtcggcgacagacccgctgatccactccctgctgtgacctcccctctttgcaggaacaaggccaaggaaaagaaggccgccgcgtcgcgcgcttgatgacctccaaccggaccgtcttttcttccttctcgctccctccatcctagacgcccaagatgcgcaggattcttccagccttgactccggttccgttcactctcccgtgccagcaccgtctggccctgccgcaccttctcgctttgggtcgctcgcatctgcatcaccctcttaccacctgactcctccatcatccggctccgctctatagtcacattgtaatacccactccttctttcgtgaccttggccccatggccctgcgatgcgaaacgacctgcaggtgacgccgactcgtcaagctcgaccctcagccgcctgacgacactctgtccgctttgccttcgccaaggctccgtgcgtgccagtttgtcatgagccatacagcagatcgctccgcaagatccacttgacgcccttgaggaccggcgcgccctcatgccgcatgcatgagcttccgtgccgatgaagcatcgctgctccacgctcgggctggaccgccagcgtctcgcccttcttgcccggtagatggaagatggtctcgccgccctctacaggggcacccttttcattcaggtagatcagaagcgtccactgactgaagtactttgggttgacctgcgacgggaccgactcatcgtagtggcccgcgaagaactcgccgaccttgtacttgtagacgcgcacattctcgagcaggcccttgggcgtcggcagctgagagcctcgcttcggatgcagcgggtcagacggccagtcggcaacaatcttgtcgaggccggtcgccgtgtagagatgctgggcgaaatcgggcgcaaacgtcgagaagcgggctgcacgaaggagggaggggcccgacacgtaagcatgcgcaggatcccgacaacgtgataagcaagcggcccgcaccgttcgtgcgctttgcctctcctcgcttggcaggtggcgacggtacgagcagcggtgtgatcgtattggcgaagaaggcgaggagagcgtcagcgtcctgttcgtgcaagaagtgctgcgggcgagaggaaggcgaggcagcgtcagtctcggtactgagttcgttcagtaaagatcggagacctactcggatcacgacgatctggtcgtccaacaagatttcgacctcccggttgaagtgtggcttggtcgagagtgtaggccaaggcagggccgtcgaagggccggccgcagtcgacctcgagccagtcgacgccttgagcccctttgcgctcgccttgggcgccatcagacctgataaggagcaggcaccgactgtcagcatgcgttctaggcttctctggtcctcatcagcgctgctctttgagaagaaacggacaggttagagaaggctgagtgaccgttacttggtcggacccgaaagctctctggcgcacccctaacggccacctcgcccagccctactcgccagcaattggcctcctcacaaccatccgcctcggcgacgtcgtgcaggagacgcagagacagcacccatagccatgccgcccgtccgctccttccctcggtcggtgacggtcctccacccggcaccctacgccctgccgactggctcctcgctcgacgccgagatgccgcttccgctcgtcccgtcgacttcgcacgcctcgtcctcaagagctggcgcctcggctggcggtggcgagctctcctcggaacgggtccgggcggctgcacggaaactggcgaggaaagagggccagctgctcgtcgacgaggtctcgctcaatgccggcgtgatgggccggggtggcccgggcgaggtctcgacggtcaaggttcgtcggcttatggcctgttcgagagctactattcgcccgcactgaacacacttgctcttctcctctttcagagtgtcaaaggtgctcaggactggaaccgcttgctatgctgggctcggaagcgccgtgggccgcaatgggatgcctgcagtacgtcggctcgacccagctcctcctcgaccccgaaccgcagcccagagggctgacgactctggcttgtcgaatttgctcccaactgcagcccagatgtaccacgtcgactacctctcgccagagtactataacccgccggcgccgctcaaagcggttacgcacggggcctcacgaccaacaggcgcggtgcgacctccttgctcatcctccgcacccgggctttttgcccgcaattgctaacccgacttggacgcttgatctccaggccggccatctccagcctggctacccggcgcaacagcacaaccctgccgtcatccagtcgacgacgtcggcaaatcggccgtcgcgtcgcaaagcacgcggcgattgaatttcgacatcgagtggcggtggcggcgtgcccggcacggccagtcgcttgagcgaaagacgctctcaagagtcagagcgaggctgcaggacattccgctgctcgtcgagcagtgaagggacgaagcgtatcgggagaggggttggtgataggtgctgccggaaacgatggccagaggaacttggagctttaacgatcatctcatgaacaaaagtttataggccgcagtcgtctgtgtgcgagcgagcatcgagcatcacagcaaaaggagagaggcctgcttgccgactgcctgccccgagagcaaggcgagcgtgcgtgactttgctgcgcatccctggtcgggagagttcgtcgcgtcccgagctcgaggccgactcgaccctccgaccagcaccttctcttcgacagtttcgcagcagcggcagctcctgagcacggcctctcgatcgtcgaacagctcgacccggactagctcaacctccacggcactggaccctctcgcggtaacgacgccgacgacggacgagctcaaagcccaccctcagccttcccttcattcattcaacaggggccgcttttcgcttgaccggccacccttccgtcctccgacggcaccgagcactctgcgctgccctctctcgggtagatttgaccatgaacccccagacggccatccttttcaactcgccggcgctgcatgcccgtgagctcgcgagaacctcccgcctccgcagcagcccgagcgtgagctgaatctcccaccctctcctcggccacagtgcagcgcaagcaggtcagtccgcgcttccggaatcgtcagaggatctacagcgcgtctgctgaccctacttgctctcccctttcaccagctcatcagcctctgcaagcgctaccggatcaaagcctccggcaagaatactgacctcatcagcaagctgcaggccttgtgagtcgagtgggagctgacgacaagcatcagccgcgacggttgcctgaccaatgccctgcttctggctccagtggcgagcagctcccgcaggatgcgcgagtcgacccagagttccctctcgactcgtttgtcaaggacaattgcccgcctccagccacctcgtcgtcggtcaagccgccgcgtccgagcgagccctggtcggttctcgagggcgagtcagccgccgccgatgatgagcagatggaggtcgacgacgaagacgacaacgacacggtcaaggggagacgcggttggaagagcgccgagaacggagcgagcgagctcggcgagtttgggatgccgaggagcatcagtgcgtctgcgcctctgcagattgccgccgctcaatcacctgacgtctgacgcccacgtctctcgagccacaggcgcctcctcgctctctcggtcaacgagcaagaagctcaaatctttcctgtccggctcgctctcgcgcaaggccgtcggctcgatcaagacgtcgaagtctgcgcgagaggggctcaaggtcgacaccttccgcgacccggccgtcgcctctcctgctcctcagtcgcctgaacccggcgtcgcgcgcgcgatgcggcccagtattgccggcgaggaaccgacgatccgcatgctcgaggcctcctcttccgcctcggcgtcgctctacccagagctgccgagcatgcaggacaagcgcgccgagggccgcgtcccgggcggcttcccgtcttcgaccttctcctcagattcggtagtcaagacgctcgagccatcttggtctccggcgccgttcgtcttcggctcgccgatgccctcccgccaggcgttcgacttcaagagccccggcgtcgcagccccggccttcgccttctcttccttggccggaacggccgatgtgccgcagacccagacttcgacgtcgcgcgacatgcgcaccgtcatgcaggaggagatgcgcaagctgatggcgcagaagggcgtcctagacctgccggcgccggcgccggtcgagaacctcttcagccgcgaggtgctcgactcccttagtgacaaaaaggacgtcaagaagcgccgcttcgatgacatccacgagaaggagttctcgaagtaagcccgccttgacagggctggccagtgttgtagacacgaaactgacctcatttgccacttccaggatgccctccatcctcgaccaccacagctttcgccgcaccgctccttcgacaacggccggcggatcgaaagctaagggcaggcggctctcaactacggcgacgccccgccgacctcggcagggcaagatatcggccgctgccaatggctcagcccaccaacctaccacaacagcgaccacgagctcgcgccgagtctccgctctgcctacgagcgcggtcaagcgcgtccgaccctcgcgccctctgcagccggcattcgagaccccttcctttcataaggagacgtcacaaaacgaccgggcggcgaagaaggttaagattgaccgtcacacaacgaagcccgcgcctttgctcgcgccaaagccggcgaccggagtagcggaccctatgccgaagaacgtcaaagcaccggaagcgctgccaaagtccaagtcgtcccgctttggcttcctcgcccagggcatggaaagcgtcaagacgttcgcgtcaggactggctaagtctggcgccgctggcccctcccttcaagtcggaacgaccttgatttcgcgctcgacctcggcttcgaccgtccacaagctgcaaaggaaagtcccgaccgcatctgcctcgattgtcgtgccaacgacatcgttcgccactgcccgattcggcttcggtcgaaatgagaaggtcaaggcatcggcaacggcaccgaccggcatgacgcggtccgaatcgttctcgacgcggcccgggtcgacgctgctggccccaacggcctcctcccgggccaagcaggcagctgccaacatctccaccaaatcaccctttgtcaagaagccgcaaactctgcccggtcgctcgtcgctggcgagcgcacgcctaccgcagcttgcgacgtcggcccacggcgattcaaaagtcggtcgcctcgactccgaggccgtcaaagccggtccttcacgtcttgccgtcgcccctcagtcgacagtcgcgcacaagtcgccgctcacagcatcgcgtccgtccgtcacaaacaccccatcttcatcgaagacgccggtcaagcgcggcccgcagtttaaagcgcgcgtcgctctcaagctgtcgtcgcagcggtctacgaccggatcagcctcgagcgtcggccgtccatcgatggctggcggcatgtgcacgccaggcaagcagcggtcgtccgtctcggcctcactcgtgcagaagcaggccgcgaccccttcgggcctgcacgcgcgcgcgggggccgtcgctgcccgcaagaaggcaagcgagagcgttccgacgagcagcgccgcctcagccgcccgtcgccacagcctcgccggtgggctcaaggctcgcggcagaacaagcgaactcgccaggcgcaagccctcgatgcacacgcccaagaaggtccttccaaaggcgccgacgacgccgttcttcccggccgtcccgctcggtggcatcgccgagtaggcccgtctctgttcaactcgcctccctcatcctgggattcttcaattctcggcttgtcacgacctgtctctcctttagaccctcttcctcttcctttccatgcgccttcaccctctgagtgtcgccggccacctgctccatacctttgctcagctcttttgacgataccctcatgatgtccccgtctaggtccccttccgagtcgcgcgaagtgcgaaggagtcacgtcgattgagatggcaggagagaagggtttgcgaggagtggtacaggcgagtaagagaatcaagtgtatgggtggaggaaacgagaaagcgaagcaccgaagagggtgaaagtacagcacgtttgagcgtggccaagaaggaaaaaggctgtatggagccggtctaaagtttacaagaggcgtccgacgacctaccaaaagatctcggccacgacgttgatcgtctgcgggcagggcagagggtcagcgagggacatggcagagaagagtagaggagacgcaccattgcgacggcgtagaagctgatgaggaaggcgccccactttttcgtaatccggtagccgttgtacggcacgaagactggttggtgggagcagggtcagtgtcaaggacgtttgacggcgaaggggccgcgaacgggacggaccaaaagtgatggcaaggatggtaagcaagctgatctcggacgtgacaagcgaggacgagatctcgatcgggtaggcccgaccggtcgtcaatgtgacgtaggcgcccgagaggccgatgccgagcaaaatgttgagcatcggcccgccaaagcaggcggaaaaggccatgatgggcgagaaggtcgcgattgagaggtcagcgacgagatcggcggtcgagttgccgatcgcaaagacggtcaggccgacgatggcgtccgagaggccgaggagctcggccatgacggtgagcgtgttgacgacctcgtcggcgagggccatgatccaaaatatggcgacggcgaagccggcgaggcagcgggcgagccgcagggctgggtgccggccggtcgagacaaagaaacaaacgcaaagggagagcgccgagccggtcgcaaggacggcgacgagcggcatccacgacagcttgccgtcctcgggcgagaggacgacgaggaccgagaggagcgggccgactgcagaggcgggcttgaaagttagcgaaaggcatcgctgaggggagccaatgcaccgatagtaactgacggatgcactggactgcgagcagccacttgttgaagccgagtgccacatcggcgcactcctcctcgcaccacatcttactttccgactcttcgccggcgtccgcctcgtcatcctcagtggcagcaggagtagcgtcctccccgttaacgttcagcgagtagccgtccgggaacgtaaacttgggggtcgggtgcgagtgcgtctcgccccggccgtggtgataggcctcgtggtcccaccggtggtgcgggtcgtgcccaccatgaggcgtcgagggatcctcgccgaggtcgagcagacggccgtgcgtgacgccgacgacctggccgacgtggtgctcatggtcgtggtgatcgtcgtgcgtcgacgaccggcggctacccgatacaagcagagcctccttcgtcgagttgtcgtccgcgagcgtcgagtccgtctcggtccggtcctcctccccgcggtcatcgacgacgcagacggtgaccgtcagggcaaagatggccgggacggcgaggaccgagaggaatttgccgacgagcgactttcggccgagctgctggagcgacgggaaaagcgtgtgatacgtcagccgggcgaggtggagcgcccgacggcgctttgacggccgcgactgctgctgagaattcggtccgtaggacaagggcgtcgggggcgccggaggaagcaagacggcgggcggcgtcgacgaggtcgaatgaaggacgatcgccggcgctggcggggcaagtggcgtgccagggacgccgtagtgagctgcagaactggccgaccgggcacggccactgatgccgtcgagccggggcgagccgtcaaagggcgagacgaccacctggccgccaccgggccggacggtgcccgcactcgactggcccgaggtggcaggaacgacacctgcgccgggcgcagtcgactgctcccacgggttgacctcgttcgcgagcgagagccggttggcaccgcctggcgcagagagtgtcgtcccggccgagattagcgcgctggccagcgtcggggatgcgggcgcgggcggagcaaccgctcgtcggctgagggctgggctccgaagcgcctccccggcgctgacgctgcctcctacaccagtgccgccagcgccgcctccgagactctttgaccgggcgtgcgagctgtggtgatgtcggccgtgaccatgcggatgcggggcgtgcgcgtgatagtgcccgccaccaaagggcgagccgccggcgccaagatgatccttgagctgctcgaatgggctcgcgacatcgaatccgttagccacgccgctgccgtcgagcatctgctctgcctcgtccgccttgagcgcattcacgaggtcgcgaaactcgacggcgccaagaagcgaaaaggtcgagcgccggacgtcgaacgacaactggcttgcgttggacgagcgccgcgagcggttcgacggccggctcgaaccgcctcctggccgagagggcgtgcggatacccgctgggggccgggtggggccatgcgcggtcgagccggttgagtaggtcgagcggatcgacgtctgcgagcgcgaggtctgaagggtcggccgtgatccgccgtcgggcgttggcggttggaggagatcgctcggcccgctgaacgagacggccgagagcgagatgggccgctgcgggggcggtgaggtcggactgatgagggcagcatccgaggtcagaaggtcgtcctcgttatggtactctgtggtagatcgcacaagagttgggtgaagtgtcagtcgtctgctagcggcgatagggagggcgggcgccggacgcaccctgttcttcgccaaagagcctagcctcctcatcctcgtcctcgtcgacgctctcccgcccgccgtccgaatccagcctgatcttgcccatccgcctgctttcgcgccagcggataaagtagccgccgccgacgacgccggcgacgtacgtcgcgtagaggccgaccatcgtccctgcctcccacgtctgaagcgcgccgtcgcgcatgacaagcaggaggagcgcgacggctgcaagcgcgaagccgacgtcgcggaggaacggcccgcgatggacgttgaacggctggatgagggccatcgagccgacgacgacggtgacgatgaacatggctgcgccaaggagctcgccgacggcgaggctgccgctgttggtcgtgaagctggcgtaggtcgagaagacgtcgggcgagccattgccaaaggcgaggagcgtgacgccggcagtattgtctgagagaccaagcgagccggcgagcgaggccaggttcgggacgaggtagtcgcccgagacgatgccgagcgagccgaggaggagaagggtgtagagcaggaggcccgggagaaggagccacttgctccgagggccttcatctgacccaggcgggtccgggaacgggaacgtccgacgggtgagaccagaagggctgtcggtcgtcggccaggacggagcgaggacggcctggagaggcgacggccagcgccggcggccaccgacgagtgcctggagccgggtcgtcctgcccggtgcgcctgccggccggccggcgaggaggcagacgttaaggacgacgacgagggctagcacgagccagatcggaggccgacggcgagccatagcaaggtgttaaaaagcaggagaggggtcaaaggtgaggtgaagggaagggagctctgggagcgaagacggggcggcagcatcatcgcagcacgaaggctgtgcgcgggcgggacggagacgggcaaaggttcccacgtaatgatgctgcgcaagggcgcctcgagctctcgactgctgcttcaccttgcctctcctcacccgaccacgatggacgcctcactctcggctgtcggcctgcgcagtgagacgaacgggctggctgtcttgcctgctcctgcgactgtcgctgacaccccgcctgccaccctctgcgtgcagagctctcgcgctcgctcacctgtctcgcccgcttcggcgagaccgtcacgctcctctgcctcccgcacgagctcgtcctgacgacgctcagcccggccaagtcggcccatgccaaggtcgctttctcggccgacttctttgccgagtggagcctgctgccgggcgcaccaaggcggggcgtgacgtgcgacctcaacatcaaggcgcgtcgtcgcgcaagctcctctcgagccactgcgcttcggtccagtcgtcctttcattcctgacgcaccctcgccttgccttctgcaggccctcctcggagtcctccgcatccggtcgggtgagaagctcgaagcgtgcgagctcagcctccgcgacaacgagcagatggtcgttccaggccgaggcggcaggtcgcgtcggcacgaccgcaagcggcggcggacggagggcgcgagcagcgacgacgaggctgatggcgacgagggtgagagcgagctcgagggcgggagagtggagggaagaaaggtcgagcagccacggttctcggtccaactcgcgtttccaggtgcgtcacgaggcacgcgtggctcggtcgatccggcggagatcaccaagctgtcctgactcacgcagcgacgtcgttctgtattctcttacgcccaggctttaccaagaatcacgctcttcaaatcgccaccccacccgcgcacggcctcccgcagcacgagtcactcgagtcgaccttcaccgccggcgcgcgcgacgtctccgagtggatggaagcgttccctgcctggggctcgtcggccggaggcggtggcggcggcggcggagcaggtggcggaagggcagctggcgcggctggaggtggaataggcgcaaaggaagagttcctgtcgtgggcgttcgacaaggacggcgtgcgcatctcgtcttgggccggtgcgccccttcaccctgcctgcttgtgggacgtggccagaggctcaatctctcgtctcaagctgatctcgatttttttcgacccgtgtatgcgcccatccagcgaccgcccgccaggaccagctcgcgactgccttcttcgtcccggccgaggcgtttgagaacttcttcctctcgccgacattttcggcctcggccgagcgcgagcatgtcctgggctttccaatgcgcgagttcaaggtgcgagacgctcgatccggtcatccgagctgcactcactgacggacattccgccctgatccgtcttccgtttctgcgcaggccgttactctgcttgcccagagccttaacctcccgatccacgtcaagttcaagaagccgttccagccgctcgcgctcagcctcccttcggcaaatgcgccggacggtgatgttcttgctttcgaattcctcatcatgacgcgcgacgtccctgccgctgctgctgccgctgccgcgggaggcgggcggaggtctgacgctgcggccccagcggcagcagcagcgcccaaagccgagcggtcctccggcaaggcggctgcgcgggcgagcgacggcgagccggccgacagtccgcgagcgtcaggcagcgcgaccggccggctgacgcaaggcgcccggaggctccggctcgggccgagcgtcgagccgagcgggagcgaggcgagcggcggcggcggcggtgggtgctcgcagaggggccgaggacacgaagggcgacacgtctcggatattgagctgccaccggtcgggatcgaggacggcgacgaacggggagacggcatggactatcacccgccgtcatctgccgccggccgacacggcgaccctcacgcatatctcaccttctcgcacccgctcgcgcattcaaccgcccgtccgcgccagccttccgccgggaaacccgagccgcttttctaccctggctcggcatcccagcagcccctctcgcagcaggctcggccgttcgcaagccagctgacgcaggctgagctcgagggtctcggcctgggagggctcgacgggcttgactttgacatggcagacgacgaggatgacgagtttggcaacgggaggcgcggcagcgatgccggtccggggcaggaagcgcgcgagcggccggacgagcttctgccaccgaggccgacgcagacggacgctcagacggaagggacacagatcgcccagacccaggtcgagggctacggccgggccttcgtaagtgccgttctcgctcaactttccttcttcgaggagacggattgacgtccttcttttatctctcttaacaggcccgcttcgaaggcggcgagtcggacgaggagcccgacgaggccgacgtcaccgtcgcggcggtcgaggtcgaggaggcgctggtcatcggcgtcgtggaggggcaggacgaagaggaggaggagacatacgagatgagtgcagagatgtgatctggatctttctgtgcgattaggccaccggttcttcatgcgtgctctcgcaagcctgacctcgctcgaggaggaggtaggccgaccgagaaaaggggccggtcgcagcccgccgtcaagcatccggcctgagctgcttgcatcgatgcccgacctgccttcgccagcctcgcgcccgccgtccctggcaccgacccgccgaccccttgaacgcccctctcgctctctcgacatctcgcgcacccaactcgacccttcctcagcagccgaggcacgccatgtcgcactcggatggcctgctcgacccgaccctccagcagggccatctgtcgtcagaggcaggcgccgcccccgccgcccccgacgaccgccatcacccggactactcgcccttagcgacagcggcggcggtacccttgccgccagcgaccggcggccagcacgcccaaggcggccactcgatccaggacatccaggcgagccagatcctctcgcactttcagtttgcgccagccggctcggtggcgggcggctcgatgcagccgcatgccgctcccaacgggcttgagatcgctgccggtcctctacagcagcagcagcagcagcatccgtcgacggccggtcctcccttcgacccctacgccgtctatgcggcgaccaatgtccagcctagcgatggaacggctgagaacaacgccgacggaggagtcagccagctcggcagcatcccctcgcatcaggcacacgcgcacggacacccgcagcagcagcagcagcagcagctcgggcccgactttggtgcctatgtctccttcactcaccagcagcagggacctggcggccttcaagcccagtcgtacccttcgaccgccggcccatcatcgggcgcccgcaacggcccctaccttcagcatccgcagccgatgctcgactcggcgctcaacaagcgatcatacgagacgttcgccgacgacggcggtgctgctgccggcagcgagtcggacgggaacgacgccgacatcgacgacattcacgacgtcacctaccttcggcgggaggtcaagcggctccggcgcgcactgcgccagtcggccgtcccaccagtggtcgagagcggctccagcggcagccaaggtttcgcaccgcagcaggtcgctgccgactactatgcgcctattgcgccagcctcgctcggtattgcgggcggtctggtcgcagagacgtcggcggcgggcgcgcgtcggtcgggcaacggcggcggccggcggccgaagaaggtcgaggagctcgacgaggaggagaagcgcaagcgcaacgcacttaccggcaagcgtgagacgacgccacgccatcacgctctcaacgttcgtcccctgcgtctcgcctcccatccgagactcgagcctcgtgctcctacgcgctcgcctcccgccgtcatcgcgcgcacagcgagccggctgctgactttctgcgtttgtgcccgggagcagaaggcgatccgcgaccggatgaaggacctgatgggcgtcggggccgacgagcgcctaccctcaccgcacgaccctcagcccctcccggccgacggcagctatccggccggcgggcagacgcgcatttaccatcgacccgattggaaggctggcgtcaagaatgaggccaacaaggtcgtgcgtcctggctttgcggcgtcctcagctcatccctttgtttactgacagccgtcgctgtcactgccgaccacctccagtggctcgagggtgttgcccgagccgtcgtcaacgacggctggcaagcgctccggtcaccgccaacctcggccaaggacagccggctgctgattccggctgaggacctcgactttgagctcgcgttcaaggcagcccggaccgccttctccaacttcacgaagaagtgggtctcgcagacagacccggtggcaatgcagaaggcgatcaccgacgccaaacggggccggcgctgggctcgcaaggatctcgtacgtctagcgtctcgtgcctcaccgaagtgtcaccccagcgttgatagccgctgacctgatctcgacacacacagaagcagaagaagcggtcgagggcggcgctcgacgaggcctatgcctcgatctacagccagcagcctcacccgcacattctcaagctcgactacatgtcatcggagtgctcgtccgaaggcgacgacgccggcctcgaccacggccggctgcccgagggcgagtgggagcgacgcagtgggcgcgaccccaacccggagctcaacaagggcaagggcgagaaggtcctcgagatccggacgccacgctggcggagcgagcgggtgcgttttcgacgcctcagaggcttggggcgctagtcgatgactgacctccaaacgggtgtgctcgcgtctcgcctacagctcaccgagatctttggcaacctcgacgaaattgccgctctgcaggctaaggctgtcaagggcaatttctgtgcgtgtcgagacggccgcccaccgtgatcgacgtctagcgctgacctgcccgtcaactgccaccgaacctccccttctccataacgcccaacagacaccgcgccggcgctcaagcgcttcaagctccaaccactgcgcgacctgcctgttcccttagttgccgacctaccgctcgagacgtgggagttcgacccctcttggctcggccagccgagcgagcaggccgacgatgttcggcgcaagctcggccagccgccccttctcgttgcctcggcctccggctccgtcaccgccgcggccggtcagcagcagcaacagcagcagcagcagcagcaaggactcgacccggcatttgtctacgggctcgagatgatgcaggcgatggagggctacggccagccgtcggtcgagggcgccgggcagtagggtgggggccgagagcgctcgatgtaccatacagtcttctcgtccttcatccactcgctggctcggtcgccggggtcggacagagtaagccctttcgtctcgacgactcgaagtcaccgcttggaacgcgcgccccctttattttcgccgtcgcgtcaaccagcttcaggcacgccgacgcgccggccaccgcttgcctgttgcagacctgctttcgccgagttacgtttctgtaaagactgtaaaggggggagctaggtaagagccgctttttgcgggagctggcgggttcgtctgcggagggcaagtggggaagctcgccaggtgggcgaaccgcctgccagcagagcacgcgtctcttgtgcggccgactatcgttctcgacacccgagctggccgcaaacccacttccctcccaccagcacttcctctttttcccttgctcgctcaattctcgccctccctgctcgtccacgatgaaccgcagtccagttcaaggcgagcacctcgctccgtctgcagccgactcctcggcggggcagtcgccctcgctaccctcctaccggcctctccccccgagagcgctccgtctcgtacttattctcgcagcactgagcttgacggtcgtgctgtcgtatctcgtcgccggcaccgagagcgggctgacgatgacaaacgaagacgtcgacacgccgcagctcctcctcgaagaggcgtggccgttcaggcatcttgccctcaacgccagccagcagcctggaaagctgttcaagggtaagccgatggttattgagctcgcacgccgcccttcgatcaggagcatgaagctgactctcagcgccacacccgggcctcagacagcttgcggccagaccgacgttacctgactggctttgcatcggcgggcttcaccaaccatcttctcggcgcgatgaacctcctgcacgtcgcctaccacatgggccggatggagacgtcgtcgcttcctcttgtcgtcgtcctcccgccggtgccgccgcactacacgcatctcgaggcgacgggcgactacgacgttgacccattcccgatcgacggcgtcttcgacctgccaaccttcgagcaagcgacgagcatcagcgtcgtgagctttaacgacatcaaggaccttagtcaggccgatccggctctcgagagtgtcgcttgctggtcgccaacctggtcccagttcggtcgccccgacgcgtaccggccgatcgacgagtggctcggcattagtgagcgcccggtcagatatctcgtcactcctcctgttgccgagcactgacgggcaatccctctctctctcctgctctgaaccccatcgatagagcgtatcttaacgccactgccaccttcgctgctatccccaaccgaccggcagccgccgcactacctcttgccctcggtcgctggcctgctgagcccagccgacaacaaagctcgcctagacttcctgagcggccagtcacgcgaaggtgctctcctgatgagtcgctggggcatgggtgatgctgactggcggtcggtctggggcaatcgcgtcgccgactggcgggcacccgacgacggcctgaacggaacgctcgcctgtatcgacggctcatattacggcagcgagcgaggggaggaggtccgcgagatgtatctcggccagcagacctttacggccgccccctttggcccctggtcgaccattggccggcatctgcgctggcacagtggtcttcttgccgaggccgaagcaacgctccgtctgacccttggagtcaaggatggcgccccccttccgtcccccctggcgaccatgcacattcgccgaggcgacttcatcagcagctgcaagagcaacgacgcctggcaagtcgcacaagagtaggccagtcagtgtcgtcgctgacgtccgtctgtctccctgtcagtggcgccgttggcgtttatgcgaggcacctcgccgccattcaagagcgactcgcgtcggtcgagtcgagcgacgcgcgggactggcccgtcatcgtcacgacggacgagaaggaccctgcgtgagtcggcacactgctggatgacgtgcacagtcgaggagggactgaccaacaggccaccctcccctcgccgctcgacccggcgcaggtacctgcttgagctcgaggcccaaggctggcgtctcgtcgaccatgccgcgatgaagaccaagaagcgagtcggtcactggggaccaacgctgttggacgtcgccatcctctcgctcggcaagttgtttgttggtgactatcgcccgctcgacgtcggcttcgactcgcgccggcttgccttcgactgacgccctcttgcccgacatcacagggaccgacgagagcacgatgagcatcctcactctgcgccgcgttcaggactggaacggcggcgtgggcacgctcgtcaataaatgggagaagctttgagcgtcgggcggggccctgtccctcctccgcgctcgccccggttcacctagacctctcggcagcgcgacctctcggataaaatcatgttgctatctgtccgattgttgtcaggccgaaccacaagatacacagccgtctagtcctccgagacatctccgaactcgaactctgcgaaagcgggcgagaggtcagccatcctgggcgacgctcgcgcccgtcttcgagagcggacgactcacggcctgcgcgctcgcgcttggcaaggttggaagccgtctcgagggcagagacgagcggcttgtaggcgccaagataccggacggccgagtcgatcgaagccaggccctcgcgcaggaggtcagagttgacgctcgacgtggggtcggacgctgcaggtggtgacggagaagatcagccgtgcccagcatgaatctggtcggacgcagcaaggacgcacccgtccgagggtccttggggtcgatcagccgtaggtgcagcagcgggttctgaatcgacggctccttgtagtcgacgtttgcacttaaagcaaagcaaatcattgtcagcagctgctgttcttcgagggcggacggggtatgcaatgacgtacatgagcttgcggccctcggcgaggtcgcggaagcggtcgagcgactcggcgccgtagtcggcctcgggcttgacgagcttgacaaacgacagccgggcctcctgagcctggggcgggagcattttgaacttggcgtcgagcggccggaggcgcgagaaaggcaggacctcgtcgtttccgctgtcaaagttcagaaccgagtcgtcatcagcaggcaggtcgagagaaggacgacaaggctggctagacggacgcactagtcgatgtaaagaacctcggactccttgcgcatgcccgacacgcgcttcgtccgagcgcggtaccactggccgtcctcgttgaactgggcgctgacgacctcgccgggcttgggcgtccaaccgaccggcgccttggcagccgtcgtcttgtggtgggtggcgaattcgctcatcagcttctcgagtgcctggccctggttgttggccgcgttgagcgtctggacgtaaaaggcaaaaggcggtgtcgtccggacgtgcgagacgatgacgtcctggtacgaggtcggaagggccgtcgccggctggagcgaggcagccgcgaccgccttttcggcttcctcgaccgcggggtcgtacgagctccagaggccgcgacgggccttcttggcctcgtcctcggcggccatcagtgccttgccgctcgagagctgctcggccgagaagccgtgcaccgaagccaggccggcccgaacgagctcgacgccgacgttggtcgtcttgttggcgtagagcgagccgacgtagccgccagtcttgtcggtcgactcgaactcgacctcgacgtcgcgctgcataaactgggacgagaagcgggccgactcgggtccccagggctcagacttctcgccagcgctgcgagcagtacgcggggcgcctggaacgaagagatcctcgaggagtcagaacctgtcgatcgccagagacggacgatgcgcgacggcactcacggatgccggcgaggacgaaggtgagcttcttgtcctccttgggcagcgtcaccttaaagcgtgagccggcagcgacaaactcgacgacggcaggctgccggccagcgcgcttgaagaagggcaaaaactgggcggccttggcgccgctctccgaggcgtcgatgatgcgaggcagcgtcttctccgttggatcgtgaatgccgcgcgactcggcgagggcagtctgctcagctgtgatcagctccatgatctcggcgctccggtcgtcgtcgtccttgcggtgccggaagactgagcacaggcccttttcgatcaggagctgggcaatgttcctgaagggagggggcgcagtcgagtcagcaagagggtttgcggtgatgggcagagatcggattgggtaggacgcacgtgtggccgccgccaaacttgaccgtcacgcaggtcttctcctcaaactcgccatcggcagctaaggtgagacggaaagagtcagcgaggctcgtaaggagcagtgcagcagtcaagctacgcacgcttgacgtagtcgactgtcacctgaacagtcttgccgatgagcttcttgcgcgcgagcctgcaggaagcaattgttgtcagtccaacacggcaacacggctggagaagaggtgacagcatgtcgacttactccttgccctcgttggcccagaaggctagcttggggtccgtcgcccggggtgcgcgcacgctcgacagctggacacgccgctcaccgccgccgaggacgttggcgtcgccgctctcgacaatcgagacgctgtcgccgctccagacgcgggtgacgactgcctgaaaggtcttgcccttcaagagcgcagcagcgctggggccggcaggagcgggcgcctgagccgcgccgttggcggccggaggagcggcccgggtcggctgctggaacgaatcccagatacccttccggccgtccttggcggccttctcggcagctcggagcttgtcaagtccgccaaaggacgagagcaggccggcgtgccagtcgaccaccttggcgagaccagcctggacgagaaagtcgccgatcgagccttggggcgcgcgtacgaggccgatgaagaaggccggcgagctcgcctggctaccgttcgagggggaaccgttgccgttggtcgctccaggcatgggcgactgaccgatcgaggccggcgaggagatgaggacgcacttgacctcgcgttgcagcaggcgcgactcgacaaagaatcttgactcctcggcgagcggctcggccgcgtacgtcgccgcgtccgaggacgtcttgggcgccttgagcccagcgagagagaccgtgacaaactggtgccgctgagcggccggtgcagcggaggtgcttccgctggcctcggcattggccggctccgcgtcaccctccgcaggctcctcgccctcgggcgcaggtgcgggcggagacggagcaggagccggcgtgccaggcaggatgagtcggagacgcatggtcgagccgtcgcgaacgctctcgacgatcgcgtcgacctccttcccgcgctgctcgacgaggaatgcctgggcggcgtcgccgctcatgccaaagctgacgtcgggccgggcggtcggtcccgtctcgtcggcccagagcccgaccttagcctcctttgcctgtgtctcgagcgtccggagcgcctcctcgtcggcggaagacgcggcgtcgcgcacgcgggcgtagccggccgagaggagcaggtgtgcgaggtcgcgcgggggctggccggggccgagtggcgcgaggagaacctggccatactctcgcggtgactcctgtaaaagaggtcttgtcaatcgggctgtctagattgcgcatctgaggccgagcggcgagggaagtggaggacgcacgccgttcgtgccgccgacgctggttgcgactttgaatgcgacctccttgccgacgacgagcttgcgcagaaactcgcgcgcctcaaacgcatacggctcgtcctcgcgctgggcagagccgagtcgcggtgccgaaagcgaggcaagatgaaggaccctgaggtggttgtcgaggagtgggcgacgagggcgatggccggcgatgaagggagacagacgggcgggtaagagatcgcgcgtgggtcagcggcgttcaagagacgcgagccaggcgacctcagatggacgagcagctctggcagcgggtcttggcatccgaccctcaaccaggccgcacgagagcagaagcgaaggcgcacgcaccgctcctttggcggctgaccgttgaccgggccggccttgtgcctgagcacgacggtatcgcccgacaggacggctgaaggtcaagtgggcgatcgatcgtcagctcagccgctttcggtgtcaaaggccagcagatcgactcacacttaacgatctacgccggaggaagaagcgacgcgcgagatggtcgcgagagcagaggagatcagctcctggcggctcaaacattgcaacagggctgcaaagaacgggatgagactgaccgccttgagctgctgaggctgagccatgttaatttggagtatttggagcgaaaaagaggaagggggggaggggaagtgatggcgaggagggatggcagagcgagggctgaagccggctcggcccgaggcctgcgggggtcatctggggtcttaaagcccagacaaattcccaacttgggccactcaacggcggccgtcgcgtccagtcgtcccgcctcgcgccctctcccaccctcctctctccatctaccagaccttagccacagcagcgcgcctcgtaccgcaatggccgacgaccgcaacgaaggtcttctgccagcggctggatccgcgctcgaagcacggcccgggctaccgctcccgccttcgccgccttcagcacctgtcgccgccgccgccgccgcgttccctcggccgccatcggtcgacaacgcctccgcttccgattccccgatggcgagcacggcactccaggccgatatcgggacgcccggtccgcaggctctgctcgaggagctctttccgagcgggtccgagggcggctcgccgcctccgtcccggcgccgaccgacgcgttcgccgtcacgcgaaccggagcagctggacgacgccatcgtggacgaggccaacagcgacggccagcacgagcggcctgccgtcaacggccgtcagtcaatgggcgtgtctccgggccctccgacgccctcagccgcagacccgatcccgttcaccgaggcatactcgtcacgcgccgggccgtcgtcgcccgagcacgcgcccacgcctcccgtccggcggcacaacgcctcgcccggtccctcacgcccgacgccgcggccgtttgcgaccattacagcgtcggaccccgtcccgcccgagccggcaccggagccgaaatcaaatctgccggtcgtctcgttccggatcgtcgagcgcccgccgctgccgccgacgtcggcggtcgctcagtcgtacggctacaacgcttcgggcccgaacggtgggccgaggcccttcattcagccgacccacctgatgcgctcggtcgacccgatcgaggccgacctgatgaaccaggtcgagtacgacatggatacgcaggactacctctgggtcgagaagatcaacgactcgttccgcaagaacccgaccgacccaatgccgaacatcctctcgaacgagttcttcacgatcgcgatcgaccggatcgagaaggagtggtgggagttgacgaagcggatcccgaacccgcggagccagatgccgagcgaggaggaggcgtgcgccatctgcgatgacgccgacggcgagaacagcaacgccatcgtcttttgcgacggctgcaacctcgccgtccatcaaggtgcgcttctcgagggccgtcttctccttcctgatgaagttcccccgctgacccactttcctcccccttgctgccgcagactgctacggcgtaccctacatccccgagggccagtggctctgccgcaagtgcaccgtctcgcccgagaaccccgtctcgtgcgtcatgtgcccgtcagagggcggtgccttcaagcagacgacgacgggcaagtgggcgcacctgctctgcgccatctggatccccgaggccggcgtcggcaacaccgtctacatggagccgatcgacggcgtcgagatgatcaccaagcagcggtggaagctcgtgcgttgccctggacggcctttagtctcggcagcagctgacgcctctcatctcgctcttctgcagaaatgctcgctctgcaagaagcccggcggcgcgtgcatccagtgcgagaacaagtcttgctacacggccttccacccgacctgcgcgcgcgaggccggcttgctcggcagcatgaagacgtacggcgacaccggcggcgtcctcaaggcttactgcgagcggcacattccggtgcgcccaccctgctgctctgttctcatctctcggaccatcgccgactgacgctccctcccccccgcttgcgctcctcagcccgccctcaaggtaacgaacgacgccaagcgggcgctctaccactcgaaccacgccaagaagacaaagaagtcggcccgggcgtacgccaagggctacgacgtcccgccgccgctcctcccgcacatgatcctcgacatcgtgatcgactacgtcaagcgcatgcccggccctgcaggccgcaagcgcgacctcgtcgaccggatcggtcgctactggagcctcaagcgcgaggcccggcgtggtgcaccgctcctgaagcggcttcatctcgaggtgcgtggcgcagcatacgagctctagcgacttgcgattgcgctactgacctcttcgtgtgcgcgttcttacagccctggacggcggccgacctcgcgaatcagaagacggaggaggagaaggagatgcaggcggcgtacctcacgcggacgcgccaggacctcgagcaggtccgcatgctcaacggcatggtcctcaagcgcgagaaggccaagcagcgccaggtcgagacgatcagcgagctgctccggccgtacctcaagccgtgggacgaccacatgtacgacgtcatcgacaagctgcgagagtgcgtctccccctcaggcctcacgcagctgccttcgacgagcgtttgctgacttgagctctcccttcaccctctggccaagcgcagctcggacaagcgcaagctcttccacgagcctgtcgacccggccgaggtgcccgagtacgacaagctgatcacccggccgatgtcgttcgagacgatcgaagacaagattgccaccgaccgctactttgcctgcagcgaatttgaggtgcgccggctcggacctcttgccgccgacgaggcccccttcaacgctcgctgcgctaaccttcctctccccttttgtcagaccgacgtcctcctcgtcagtgacaacgcgatgacgttcaacccgccaggccatccggtccacaaggctgcggccaagctcaaagaggtcgcgatccccctgctggcagagttgcgggaggccgtccttgccgagaatccgatcgagcagatcctcaagccgatcaaagaggactgggttctccaccatcaagccttcgacgacgagccgatcccgcccttccccgaggccgagatcctgctcgaacatcttgggcccaaccacaagccgatcgacagcctggagtgcaatccggccaagctcgccacgctcatccagccgctcgacgatggctcgggccagactttcctcgactcgctcttcgactaccggtacgaggttgagcccgagcccgagcccgagcccgaggcagaggccgtggttgccccgaccaccgctagcacgagtgccaagagaaagggcaaggcgcccaatgagaccggccctctggctcctggctcgactcgcatccgccttcgcgtccagaacccggccctcggcggcgacactgcggtccgccagtcgtcgcgcaagcggccgcgcgagacgtcgatgacccctccgccatcaggcgactcgcgccggccaagcctcgtcgactcggccgccagcgaaacggacgaggatccggccgtcgccgagaagcgtcagatctttgccaccttcgagcagccggccatcctgcccgagggcactcgccgacgcgcggcggcgaccttcatgcctccccggccgatcaaccaggcgcttgctgcaacgcagcaggagcagaaccgcaagaaggcctcgcagcggcgcgagaaggagccgcgcctggctgtgccccagtcgtttgttcccaacgtcaaggttcctaagcggaggccgaaaggggacaagagtgagttgggctcgcccagaagcgatgctccttccgcaagcactgaccgccccctcttttcgcgcactcgtagaggacgagaaggacgtaccaccgcccccggccggcccgacgcctcgctggacgttcgacgacgactcggacctctcctccctgtcgtcgcacgtctccgaggtagagtccgagtcggagaccgagccgctcgacgagcttctcttggtcgagccccgaccaaagattctggcccgagctttctcggtcagcagcggcgacgacgacgaggtgcaggaggtcgcgccgccatcgcgacctctcttgaaaaagaagcgctcctcagccgcccgcggcgacaagccggcaaccccaacccaagctccgcgagcctcgttatcggccgccggtccctcccggactaccggtccgcctccagcgatggaagtcgagtcgccccggaaaacgcgctcttcgcttgtccccgcctcgacgcctgtcgccgcccttcgcaaccggctgcccgtcaagcagagcggcctgcgccgccagctcactctcgactcggacgagagtgagctcagcgcggtcgctgcgcctgatgagggcgacgacgacgacgactcgctctttggcggttcgctcaacgaagaggacgtcgtcgagggcctcacgacagatctccctgcgacgctggccaagatcaagtcgcagccttctggcctcgccggccgtcggtcgtcgctggcagatgggccagcgtcgtctctgaaagtctcgctccggagctcgcggcacgaggccgactcggagcctgttccggaagcaagcccgtctgtcgcacgaacgcggtccaaccagtcagcgccgacgcccaagactgcgcctcgagccaagacgatcgtcaacagacaggtcccgacgacggcccgctcacgcaaaggcctgtcgcccggcgtcgccttcaacgtgccggccagccccgcaccgagcggttcgactcggtcatcggcgcgccgttcgtcactcgtcgctcagccgccaccgacgccctcgccgtttgaagtcgaagtcatcaagcagcacgtcgcttccgcatcaaagacggctaccggccctcggaagtcgccgtcggccggcaaaggcaagggcaaggcaaaggctgcgactccgatcgacgacgacgtcaacatggaggagccgctcgctgccgcccttgagcctgcgccaacggcatcgaaacgcagtaaccggcgctcctcgagggccatcgggaccgcgtccgactcagacctcgcagtcttccctgcgtccgaaggagagccggcttcggagccattggcggagcgcccactcgaggagcaggagtcagaagcgcaggagccagaagctccgcaagaagacgaaaaagttgcggcggacgccaagcagccagccaacgccggccgatcgccctcgcccgactcgggcgtctcgccgctgatggacaaggcgccgtccttcgaaggcgaagaggaacaggacgatccctcgccgaagaagaagtcgaagaaggcgacggccgtccggcgggtatcgaccggacccgttcggaccaccgcgacttgcggccgccggtctttgcccgctccagtgtcagcggacgaagccgagcaggaggacaaggagaccgcggtcgagccggcgccggccaagcagctgtcgaaggccgctcagcggaaagctgcggctgccgcccagaagcaggctctgctgccggtcgagccgccccttccggcgtccgatgcgccagacgcagtgtctctttcggttgtcgcttgcacacccgaggaggagcccgagcccgagctggaggagtttgacgagaagggccggccgaagcgccggcgcggccttccgaagcgcttccaccacgaggcgatcgtcgtctctggctcgcctccgcctgccaagaggcagaaggtgcgccgctctgaggcggcgggttcgccagacgctgccagtcgcgcagagggaccggagccggtcaagccaaatgctgagcagaaggggctcgctccgcccccgagcggcgtctgggacgacgaggaggccgaggacgaaatatttgcccatgggacgctcgtctggtgccaaggttcgttcaaaccggtcgacttgctgccttaccctctgcgctctctgttgacgcaaacccctccttcgctgcagcgcaaggccacccgtggtaccccggcgagattgtcgtcccatgcgagatcgaccacgaggactttgacgacgaggaggtcccggccgacgtccatctcgcgtacaaggctgcgcgcgaaacctggatcgagggtggcggcgcgcccgaaggccggccgttcctcgtccacttctttgaccagaagcgcttctggggcaccgtccggcccaagcagctctcgcagctctctgaagaccaaggtccgtccgcttgcgtcactgtctttgcgcaattcaccgctgacaaagaggacccctcccctttgccagcccacgaccgagcgctgctcacttaccagtcggccaagaactttcagaaggccaagatggacatcctcggtgcttatgagtgggttccccccgtttcgctcctcgaatcgctggcaaagaagctgacgccgtggccgcttgctttcgccccgatagacgtgcctggagcacgctcgagccagacctgcccaacccgctaccgccgtggttcgaggatgtccggaaatctgtcagcgaggacaagaagtcaaagaaggccaacaagaagaagacgtcgtcggcgcccaagaaggcggcggccggctctgcggtcccgtcggctacggtcgctaagtcggagccaccggcgccggttaaggcgctggtcgacgaggacgtccagatggccgacgtctctgtcgcagcagacgagccggccgccgaggatggagccactgcggctgtcgctccccctctctcgccttcggcatcggcatcgacctcggcagcgcctgtctcctcggccatccccccctcgaccgctgaggatcacgccggcccgtccgtcgtcaaactggccggcaaaggccgcaagttcaagccggcccagcccctcacgaagcggacgtcgactcgcggccgggcgtcgggcgtcgcatcagcgtcgatggcgccgacggcagcggcgtactcgcctcctgcatccgccgcggtggcgccggcggcggcggccgacgagcagcaagctgaagccgagccgtggaggtcgacgtcgacgtcgatggcggtcgacgagcctgcgccggccggtggtgccggcaaggctgctgccgacccgacgaggggctcgactcgtctgcggagccggtcgagccagggcgccgcttccgccgccgccacctctgccccaaaggaggacgacccgatggagtgagggccgacgcctcatcgctgtctttcaactcttagctttccccttaccctctctctctctctctcagttccgttcatgtccgagcaacccgtctgtgccgaactcatgacgattccagaaagagatgggtgcgagggtggtggtgcgggtctaaggaacgagcagcatgggagaagggtggctataaaaaggggcgcctacaaagagagggtgagagcgcgtgttttggcaggaggaggatggcagggcaggcgagagagaaagcaaggcagcagtttggaggcagggtttagcaggaagcagcgcggggtacatggagcgagtaggaggcaagatgcgggaaaagggtaggaggaaagagatgggggcggaggccgtcgggtgaggggaggaatctcaacgccggcgaggtcgaccaacgctgtcggcatcaggcgagcgcagctcgagcctagacctactagtaccgccgctctccgtcgccgatgaacggcagaccctcgtcgtcatccttgcgtccggcgccggcgccgttcgcggccgagcccgaggcgtgggcggcctcgagccgaaaggcagcggccgtcgactgggtggaggcgtagatggcccagattgggatgaagaaccagggggcgttaaggccgacaaactcgccccagtagctgtgcggcaggtgcaaagggatcagccgagagcgcgtcgttgagcgagagtcctggcgcgtctaggcgacgtacaagatggcgccaggccggctgacggcggcgatcggccctttcagcgcctcgtcgatgatggggatgccccagtagaggacgaggccgtagagctggccgagcgagacggcgagctgggtcgggtgccggaaagccgagcgcgtcgggatcaggtggagcgcgagtgcgagggagagtgggccccagaagacctgcaggcgaagaggaggggttgtatgtgtcagcctgcggcgtgcctgcatggagcggaagacccatcggtcgttgcatgatgagcggggcgagggaggaagggacgcacggcagtgcagccctccatcaggacggtgaacgtgtcggcggtgatgtagcggctgtcgctgagcgagtacatcttccacatctggctccggaccgacgtcgactgaggcatcgtccgggcggtgaaggcgaagtagcctgtcggtcgggagagggtcgggatcagtgttccgcgacgtcgatgtcggtcggtgcgggggcggtcgcgggggaaggcgactgcggctggatgacgacgagaagacgcaccttcaaacgagaggtggatggccgcacaggcgccgaacctgcaggccggcgaggaggaaagggcgagaggggatcagccacgactgctcccgaagcaggacccgagccaaaaggggatggtggcttctccggctttgggcggcaggaaggggcgggcgggcgggctgccttcgagctgacgctgatccatgcctttccttctgcgaaggagtgagacggccaggacggacaagggaggcgagacgaaagccgcaggggaggtctgcgcagcagctcaaccgactacctcgatcagccccggcggcgcccgacctgctcggtctcctctctctccttgcctcacggctagcgatgtgccgtgccagagttgaatagtctgtcaagctctcgctcacctgtatttgcatgaactttcagccgccctcaggtctcaatctctcggatgcgccgcccatgaggacacgaccggctctgacccgcaaattcagaaggcaaggtggcgctggcttgaatcatttacaaggggtgtgctggtaggataggcagaagtcgtcgttcgagttcgttagagagggcaaatgggaaggagggtgcaccggaggcgctggcggcgggagggcacgttcagcgcgcctcgaaggcgagcgggcagtgaaggggggtgagcgtgataacctgcttggccttgagcatgcgttcctgcgcgtcatggagcgtctcgccagtctcaaagacaggcttgatcttgaagcggcggacgaggtgggcgagggcgcacatagactcaacctctgtgaaccggcggccgatgcaagccttcgatgttccgccaagaaggccatcagggaacgtcagccgcgctcagcacgagtagatgaggaagcgagcgcacacgagggccggaggaaaacgggaggaacgcgtccttgttgtaggcctcgaggaaccgctcgggccggtaagttttcggattggtccactcgttggggttgtagtgcagaccgacgacgctgtacgaaaagcatacgggtgagcaacggcgcagcgaaagacgattcagcttgcatcgagggcacacactcgatcatgacgaggctgtcgcgcgggatgaagacgtcctcctgaccgccgccggcgagcgttgcacgcagagttgtgtcgccagtcgcgacctttggcaaaagattgacgggagggaaaagccggattgactcgttgtagcaggccagagtgtacggcagcttgtgatagtcgtcgtatgactaggatagcagggccgtattcgggtcagctcagcccaagcagaggcggatcaatcgagccacgcaccagttcaccgttctcgccaccgactacaacctcctcgtagagcttctgctggatatcagggtgaagggcgagaagcgcaagcgtaaagctgagagaattggccgtcgtctcgtgcccagcgaggagaaagataaagacgttggagcgcagttcgatgtcggagatcgggcttccgccgtcctgctcctgggactcgagggaacttcggacgaggctgccgaagaggtcgcgcttctcttcgggcgagcagccgtccttgttgaccgtgtcctcgtcaaagtcgacgccgtggaggatccgctcgcgacggacaatgacgagctcctgcggggtgagaattggtgggtcagcaggagcaaaggcatcgggatgcagggcagactgacctgcatacgccgctccagggcagtaaagccacggtcgatcgtccaaagcgttgacgaagggagccagaaggcccattggggcagtagcatgcgtgtgagggtgttctgggcgacgatgcgaagggcttcctggacagtgagaggccggccgagcatcgcccggaaccagctgcagagcccaccaccggtcgtaggctgctgtttgagcatcgacttttgaaggcgatcgctgatgccggcgtcgtcgagccctgacgtctgaccctcgacgtctggcgtcgagggacgcgcgacgcataacatgcgcgacttgccgccgagactgtcggtcggcacctcggcttgatccgaccaccttaggtcgataccgaatcctgcctcgctgatgacgacgagggcgatctaagaagagactcttcgagtcagctcaggcgcaagaggaagcaaagctgacatagagatcggcctaacgcgcagagttaggctgtggatgtggtcgacgacgaacgactggccgggggcgaggttgtcccagccctcgtgccgggtcatgtctgcgataactgaggagcgaggaagagttgagtcgaccgtcagcgatgctcaagtgctgcgaacggggacggggtgaacggcaacgtactcgacctggtgcgacgccaaacaagagggtaggcgctctcgctgaacgatgactggacgaccttgcgatggcgcttccaatcgtcgccctccgtcgtcaccaggttcggtccaaagaagtcgagggcccagtacatccaggtcggctcttgagttggattgtgggaagccaagctgatgaggtttggccgaaagagctgtctcgtagcaggatgaactcacttcggaacgtctggcggtcgaggttgagcttgcggatggcggaggcgttggcgacgacgaactcggcggtcggcgaaaagaaggaggtgatggtgatgatgtcactgccgtacttcgcgtacttgccggcgaacttttcctgccagaaccaatcgccgccgagcgtccagcgcgtcgtctggaagatgtaggacagagggtgaaaggtaggaaagagcgtgtcgaggcgagcgtacgaggcgtgagcgacctgtcggcggtagctgcaaaaaagggtaacagatgtcagtcgatgcttcctgaagatcgattgcgagtgccactcggcccgaggagtcacgtaatgtacgagttgcagaacgcagagaagaggaggaagagtaggagcgagccgacgacgggtttgagcgcttctcgtaagctgccgtcggcccgcgcgtgcttgagtgcgacccagagggctgggagccgctcgttgatcaggtctttcggagcggcttcgatcgaggcgaccgaccggaggcagttgaaagcgtcgagcggcatgtcgaggaaaggcatcgcaggcgaaagggaggggaggcaagcgggatgcgagcaggccgcgggcggaggacaacacgagcgcgagagcaggagcagctggacgcacagcgtgcggaaggggacgaggacatcagcttccgcctcgagtgcatgtcgacgcgttgcaggatgcagccactcacaggagcaagagcaacggttgacagcagaagaggttgagaacagctggtagcaaggcgagccgggcagcaggaggcctttcgaggcagaggcggatgatcggcgcgtcgagcgggatcgtcgtggcgggcaggcgttttcggaagcaagcggcgggaaagagaggcggtgggcgggacgagggctaggtggcagaggcaggagcaggggcagaggttcgttgttcagggcagcctggcgaagagagagtcgccgttgacgacgtagatgaggcgagcaagcagccactccctccggcctctcttgcgccgccagtgtttggtcgaagcaacgcgtcaaaggaagaaaggggctggcgggcggctgaaacggcggcggagaggcgcgctggtgtagtgcctgtggctctttcgggtcggcgcgcacagagtaaaggtgaagaggggacgtgagacaagcggcagggttcggagatgcgagtgtagacatcagagagaggaagtggtcgacctagcgcggagacaaacgccgatgtcgacggctcaacgtcagtgacgagcagcccgcctcgggtcaaaagcacggcggacgctcaccagccagcttcagccgaaccgagcgagacggagcgcacggatctgctccggcgtcagggcgggtgcttcggctccgtcgtcgtcagggtcgtcgtcgtcgtcatcggcgtcgacagcgtcccctttgcgatccggcttggccgcaggggttgtctgcaacggcgggggcgaagggcgacggatgaagggcgaaggctgaggtaccggcaaggcgagcgcgggcgccgaatagtcgtccgggatgccctgcatcgatgccttgatggcccgttgcagctcggcatcctcttcgtcgtagactcggtcgtacgtgccgaaggccgagaggtcagcgtgcgagtcgaggtaggccggcaggctcggaggccgggcgagatagtcgtcgtccctgtagtcgatctcgatctcgccgccgaggtcttcgccgtcctcgtcggcgccgtcgtcttccgcatccatggccgtccgcgcgcccgacgaggcggctagactgtcgcaggcctcctgctcccgcagcgattcggcaatcgcccggcgcatcatctcttcgtcctcgtccgtgtgcgaagctgccacaggcggtcgatcctcggctgacgggcgccgctgggtaaaaggtaggccgatagtagcggtcggaccgaccccttcgtcatccgactcgtccagaaggacgggttccgggtcggcctgccggcgccgccggaccgagtgggctgcttcatcacgcgacgacgctccgctggtgctagcgctggggttgccagccgcactgctctggccggcgcgcgtcgagcgcgagcggacgccaaagctgccgaagcccatctcagcgtcctcccctcgtagggccgccgcttgatcgcgcttaaagcgttccagttgcgcttgagcacgcgcacgcgaggcggcgacggggtcgtctggctccagcgagacctggcgggctgaaggcgggcgagacggcaaggaagagattggtcgagaaggaggcgtcgatgtgatcggggtgccgctagccgaagcgacagaagcagcaagcgcggcctgaagctcggcatcctcgtcgtcaaagttgccgtatgacgcccagtcaacgccgttcgctgcggccttcgtagcaaacgcctgggcctctgtcgagacaccggatacgctcagctgttccgccatgcggtccgcgcgtgccgtctcgaggatcgatggctcccgtctcgagcttgacgagctggcgtgcgccggctcgctcgggcgcaggacaaaaacagaatagccctcggtctcggcctgattcagcgtcatgccgaggtagaggtccgagacggcctgcggctgctcgttgaaactgagagggcacgcgggtccgtcagcaactgagcgagcgcaagaagatggatctctttggaagccgcacctgttaaggttgtaccacttttgcccgccgaagcgccggataggaaaccagtgctgagagaggtttaggataaacgcctgctgcagcctgcagggagagagacgaggtgcgtttcgatgctcagtggaggccgcttcgagccgcgagcgctgtgcgccgacacgtactcgggccggtcccactcggacttcatctcctcggatcgccaccgctcgagcttgaggctccagacttggaggcacctgtcggggaacgacagattcagcccgagacttgacacagctgaggatatcggtggtgagctcaccggtcgaggacttgcacgctgaagaagcctgagcagcgaatgaaacggagcacgccgggcgtcagctcaggaggtgggggggggcgaacgcatgcgagctcgggcttcggctcaccagtgtcgtccatgttcatcgactcgggccgatcatcatcgagcgtctcgttctcctctatatccagctgctgggcgactgtcgccaggtctgcaacctcaaagtagtggctctggaggacgttgttctgccggcaagaggtggaggtcgcacgcccgcctcagcctcgtccacgtagacgggcgagatggcctctggaagttgcagcagacgcaccagtgcatgctgtccacagagactcgtccccggctcctgcttctcgaagaagatgtctttcgagtgtgacagatggccggacgtcagcgccgggaaaggacggcagctcaggaagcgagctgcgcaggcgcctctgctccttcgactcacagggaacgaggtccatctgggcgactggcgatacttgagcagtgcaaatggtcactcgaagctcgaggatgcggctgctttgattgcttgcgctgtcgagtccaggtggcgagcagttgggcgagatggaggtgacgggcgaatgagagccagggcgcgtctggcacggcacgcgctggagatcgagtcgaaccgtcggaagcgtcgcttcatgtcagcccacctgctcctcccgtcacacgatgcctcgtctcgagcgactcgcctgacgatcagatcaaaagcaggttttgttatacaaggtccaacgtaaatctcggccgggcggcgcgtctaagggtcgctggtctatggaaggaaaaagagggttccaagtctactgcgtccgcgactggggaaggaccgaggccggtatcgacttgataggcagcgacggatggggtgaccggtgtgccgggtgcgcagcgtgctcagcctcaagctcggcgacagccatgttggccttggtgttggacgccgaaaggaaaacgttccagcctgaacgagccagtcagaggcagggtcagcgctctgcaggcagcctggctcgggtgaattttccgacgagacgtaccgagaccgacagcctggaggaagaggccgcgatgggcgagcggaacaatcgagtaggtgagggccgctgtcgggacaaagacggccgcaccgcggatataggctggccagaagccgacctggaccttttcgacggcctcatgtgtcgagtgaccctccatgagcgacatgacggagaagaacatggtcaactgcaaaaggcgacgacgtaggtggggggtggatctcggtcagcgcagcaaccttgtgccggcaagcgacggcgaagggggttgggaagactgaccgagaagggaccccagagcgtttgatccatcgcaactttggtgatgacggcccggccctttgactgaaaaggtatccggtcgacaagccggaaccactgtgcgaggatcggcgcatgtaagaaaaagcctgtagggtgggaggggtgccagggtcagccgactgggcttgaaggagtcaggagtttcaaagacgcaccgtagactgcgaagcggcccgtccttgtcagctgtgaagggtccgcagcgacgaggatgggggccgtcagcattgaggtcggctcgtcggagagctcgacgtcaccgcccgcgcaggagcaaactctggacgcacgtcgtgccccttgccagcttcacgcctctcaaagaaccgctgagcgatggcgtcgccgctgcccatcatcgtcgcagcgacgatcgaccgcgtcaggtctgggtcgatgacggttgcggtcagcaatgacgagctccgagagcgacgcacggcaggacgtacaaggccgcgtcgccagctggcgcgtgtaccacgtccaaggcatcgtgtctagtcgtcaaagttctaccgtcaaaggcccgccagcggctttgcgttcacgagaagctgcgaagggggaggcgtcgagcgagagcgttgtcgtcccggggggagagcaggcgcagcggcaggtctggctggggctttcgttcggcggagttactcgacgccggaagggacggacgaccgtcaattcgactggggccgaatcacctcaatcgggctaatcggccaatcatgatttggccataattcgacgattgagcggaaaccccccgccaaacggccagctcacccctccagtctcaacctcctcccaccaacgcgtccagcctacgacgccagccaccgcttcggcaaggctgcggacgtcgaggagagcctgctcgtgaaccttgagagatggcatgcaattgagggaagagcgagagaggagcgagcttgggagagaggaggggggtgaagctgtcgggcagggctcagggtgctcctggcgcgcgcgcgggacggtcagctaaattgaggcccgattcatgaatcggcgccgcggattcggacgattaggccgatggcttaaatcgaatcgacggttgtccgtccctagagtgcacttgcatttcctctcgacctccactttccgacgaaagccggtcccgtacgtgcaagcggggagggagcatggtagtcgtccctcaaccaaagtagtcccagtcggcctcgacccagcggaccatcagccgctcgacgccctcgagcccgtcgacctcctccacttcggcggccggcccgaccgagcggtagcgctgggaagacgcctcgccgtcgccctcaaagtcgtcctcgccgagccgcgaggcctccttgtcggcgccggcaagcgcccgtctctcctcgtcgtcttccgggtcgtcggcgtcccagatggtggctcgagtcgatcgcaggtcggccgtcgctggcgcgggctcggccgcgagcgcctcctcggcaaactctttgagcgcgccgtgccaatcgagcttactaaaaaagtcggtcgtgaagtcgccgtcctgcatgacgaggtcgtcgagctggcgcttctggtccgcctttttgagcatgttctcctcgaccgtatgcgacgagacgaggcggtagacgttgacctcgcgcttctggccgatgcggtgagcgcggtcctgggcttgcttgtctgcgagggggcaagatcaagattgaagtcagtcccaatcgagcgggagcgagcggccgcgtgcgctgctcacccatggccgggttccagtcgcttcagagggcgcacatttggcaggcgggtcagccgctatgcaatgtccgtcgaaataagcgactcgggagacacacctgtcgtacatgatgacggtgtcggcgcccgtcaggttgaggccgacgccgccggaccgagttgtcgcaataaagcagaagaccttgtcgtctgcgttaaacttttccatcaccatctggcggttctcgaccttggtcgagccgtcgagccgcaagtaacgatggccgtggaggctgaggaaggtttcgaggatgtcgaggacgcgcgccatctgcgtaaagacgaggacgcggtggccgccggccttgagcgtgcgaaacatgccgaagaggacttggagcttgccgcagtcgtactgaatgagcgacgcgtccggaaaggcaatctggtgcgcgacggccgactggtggagcgagtcgaacgccggctcggccagcgcagggtgggtcgggtcgagtccggcgagggcgagccgggtcacgtcaggcgcgacgaccatgggcggaatgacggcaaattgctgaatgacgtctgcgttctgggcggcacgggcagcgtacgactgaacggcagcctggatgagattgcttgcggccggccaacaagccgagcccgcctgaccctcgaggttgtcgatgggcgtgaggctgctgccaggcccgagctgccgcacaagagcgagcggctgctgacggacgatggcttcggattggcacttgtagtggttgaagggtgcaagcagccggcaggcgagcgctgccgcgctctgcttgcgagccgcctcgtgcgctttccagccggcgacggtccgcacgtcgacaggcggcgtgacatcgggtgcagtcaccatgccctcaatctgctccgatgcatcgagcttggccggcgcggaccgctgcatcgagcgctggcggagaaaagagatgccggcgttgcttgggccgagcgaggcggacggatgtaggtcgaaccgactcaggtcaaccgtctcgtgcgcctcgcgcaggacgagccggcgtcggacgaaaaagtcctggatctcgtatccggccgccgcggcccggtcgagcagcacaaaagacgtgcggattggtcgcgtctcaaacaggtcggggtggttacagacctgtgcgcgaagggccgagagtcggaagtcagctgcgactgcggccaaactgcctagaccgatccgtgacgcaccttgcgcagcttcatcaagcagttggagatagtgaggacgtcgttgctagagagcttctcgcgcgtctcggcccgcgacataaactcgtcatagaggaaacgctgccgcttcgacagacggcagtaaacgacgtgctcgcgcttggccggcaggcccttttcgacctcagacttgagccggcggaggacgtacggccgcaggattgtatgcagcttgtcgacaacgcccttggagccggaatccgtcacatctccggcctcgatagccttctcgagcggagctgtggcgatcagcaaaagtgcaagcacgcttcagcgtaagcgaagggtcaacgctttcgacaaacggcagacgcactcgaaaaccactcgttgaacatcttgtgattgacgaacgctgtcccgtcgagctcagcctcgttgggcatgaggaagtagaggagcgaccagagctcttgctgcaggcgagccaacgggagggcggtgtcagtagctctgccgtcgaggaaagcgagagagggctcggcgcttacgaggttgttctgcagcggggtgccggtcaggagctgcagaggcatggctagattagctcaaaacaggaaggacgattcctgcccaaagaccagacgcacgagacgacgttcggcgttgaagccgagcagcgtccaccactttttggacttgaagttcttgatgttgtgcgcctcatcctgtcgaccggcagagcaagcggtcaggcacgtctttcgtaaggcagtcaggcgcgcgacgcggcgcagagtctcaccagaaccatgtagccccactgcttgcgcttgaagaccttggcgtcggtcaccgcgagctggtaggaggtgatgcagacctcgaacgcgccttcggcgtcccagccgcggcgcatcgagtcgcgctccttcttgctgccgtagtaagggaggacgttgaagccgggcaggaactgcaaagctcggcggcgagggcgcatgagcaaggcgggtcccgaggcctgcctgcgtgcagcggccgaattgcgtacctttttgaactccatgtcccagttgagcaggaccgaggtcgggacgatgacaaggtgtgggccccacagaccctttgcgcaggctaggtgggccaagagggcgatcgtctggatcgttttgctagagaagagggagcccgcgcggaaatgtcagcgcgaggtcgacggcaaacgcagacgaggcttcagactgacccgaggcccatttcgtcggccaagatgccgttggtgccgttgttgtagagcgagacgagccagtccagaccgtcctgctggtacggccgcaggtcgccgcggagcagggacggcttggggatccggggggtgcggttagcgtcggcgtcggcaaagatggcactttctccattctcgctctcgctccggggaggcgcatcgacagtcgatgagggcgaggtcgactggaccgggctcgcagcttctaacttgaccggagggacggcgacgtcttgaatagagattagcgtgaagtcaggctttgcctcgagcggccgcccagtcggctgagcagggagggccccaggcataacgtcgcttgacagcggcgcagagccgacgttaatcgaagtcttcgtcctggatttgacgacggtcaacgctgaacgagcgagcgggatcgtgaccggaacagcgggagcgcccacaggtgtcgcccgaggcagactgattacttggatctcgtcgtcgtcactgtcgctgccgacaaagtggacctcgtcctcgtgactgctgtcgtcaatgacaataggctcggcgaccgcccgagaggccggtcgctggacgggcgaccgagggagggggctcggcagggcttcgggcccgagaagagcgtcgtccgctatcgacgggctcgcaggcggaggcgacaggaagcacatcagctggcgattcatctcgtcctcggagtcagcctctaaagccgcatcggcccgctcgtgcttgggagaagggtccagactggccgatggccagacgaggtcggcccgacggtcggcgagcagcgcctggctccactcgagcagctcgctgagctgctccttcttgcggcggcgttcctcttcgtcctcggcggcgcggtgtttggtgtggacgagctgtcaagatggacggtcagcttctagaaccttcgcctgggcagtagcgagcgacgtacgtcgacagccaacgaccacttggcccggatctcccttgccagcttccgggcgccggctttctgcgccttttcttgctctctgtgaggtgccagtcgtcaggggtcgcagaacagcggtcagggatgagacggcaagggagtgaagactgcgggcacgcacttgaggctcttggcgtcccggccctccttcttggcccagtagtcctcgatcatctctgcgatgcgcgtcgccgtccggcgacgaaaactgctcagtaagatggccgatcgctgagctcgacggacgtcgtcgaggaagtgatcgtgctgcgtgaggaagccgccacttcgagggaggaaggagatctgcgcttcgtcaaagaactcctcccgctcctcgtgctcggtttggagttcgagtccgcctgcgtcaagccggccagacgagcgcgcgaggtagaccttttccttgacaaaggcctcgtggcggatggcggccatgctgtcgaggcagacgacgtcgaggtcgggatcgggcgagatatccgtcttggggcccttgagaaactgggaaagaattggcaggtcttcctcggtgtagtcgcgcagctgcgcctcgttcgtgtagcgggggtaagcgacggcctcgtgcagtggtaggttggccgctatgatgattggcgagagtggcggcgagacggtcggggggatgcggtcccagtcggcggccgactcgagcgacaaagacgacgaagacgatgacgacgacgtgaaggaagcgacagctttgccctgaaaattgagcctgagccggatcggctgggcaacggcgagcgtggcaggaccaagggcagcggcggccgatttttctccgaccgttggccgagcagaggaacttcctgggacgctctggccgggaaggaggagcgacatcgacagaggtggcgggggcgggtcgtacgacatgccctcgccgcggacgtcgtcgctgtcgctgtcgacgttgatgacttcggcaggatgactcgagccgcccgagggcttgctaggctggagagtccccaccggcgcgccgtcgtcgccgtccgaggacagatggacaaacttggcctttggtcggcggaccgccgagggctttggagccggtcgccggaaagcaacggcctcgccgtcggcgctgctgtcgctgtccgagtaggccgtgtgcttcgtgatgtgctgaaacttggactggtgcgacacttgagggggcggcaggcgtgacgtgagctgaggcggcggcagacgcgacgggccggcgagcttgaccgggcggaccgacgacgacgatgaactggccgccgcagccggcagcctctgcttcttgagcgccgcctcgtctttgtccctttgcgtctggaggtcgcccttcttccgctcaacgagctgtgacagctttgaggccgacttactaggcggcggacctcgcttggccgcagcggcagccttctttgcctcgcgctcctccttggcatgtcgctcgcgttccttccgggcagcaaactcgatgcgcatgtcctccttctcgcacttggtttcctcgtcgtccgtctcgatcaggtcgtcgtcgtcgagaatgcagaaggcctcgcgcggcaccgctgggttccagatgagggagccgccccaggcagcaccgagcggcacgtcgccgtcagcgcggtgggcatactcgggtgcttctggcgtgagcaaccggggcctcttcttggctgccggcagcttccttttgggttccgtctggccagcaggaggcggaggcttggtgctgtgccacggtttagcgccggcgaccggcatgccgctctttggctgcgcgagcggccgctcgtgccgatggacgggcgcagaaggacgccgcttggccggtgtatctgtgtccccggtcgaaagttcgctctttgacggctgtccgacggccttccggccgactccctttttttcagccttcttgaccgagacagtcttttttggcggaggtggtccgagtgacggcgacgggagcgagggcgtgacctttgctggtccgactcctgccgggatcggtgctggctcgatgatggtctgcatggcgaccttctgggccaaagcccgccgggatgacgacgtcttccagcgggtgatgtcgccgagcttgggcggacgctcgtcgagaagctcggcagggatgagctttgccaggtcgtaattctctgcccaccggatgaagacggtcgagctgtcttccctagcagcctggtaggtgggtcggtcaacacatgcgctcgacgaggcagcagacggccggcgggtgctcacaacggggtcgtagtcggcgagaagcttaaagtgctgcaggtggaacatcagtcgccgctggcaacaaagaaggcaagtcaggtcagcctgaattttagaattcaggcccggaaacggtcgacgtacgtcgtcgtcgtgaagcgctgcgatcgtccgcagctttgccttgatcgcattcagccgatgcgccttggcgaccaactccgcgaatgataaggccggcggccgttcctccttgctctttttatggatcggtccgccgtctgactcagaactcgacgggcgaggtcgcttcgacaggtctgcctgggccgcttgcggagggggtggcggctgcgcgggcggcgacagcttcttgcgcttcaccggcggcgacggcaacttggtcggggagcggggcccagcctgtgatcgagcgccgagctgcggcgagcgtgccctctccctgttgaatggcgatactgagaggtcgacgacgcctagcggcgcgcggcggtgcgctgccaaagacggcccggggctagcggcggcgttgacctgccgccttggcgagaccgacgttgagtgccgtgcgggccagagatcggggccagaagacatcggcgaagacgacgggcggcgctgagcggtaaagtgcatgacagacgggttcatcgagagtgcgctcgggttgacggtggacacgtcggtcgtcgccggtagaagggacgaccgtcgaccctgagcgccgttcgaggtccggctcgagaccgacgacgaacggcgcctcacccgagaagaagatggcgggccctgagcgtcgtaacggatgggcgagctcggcccgccgggctcaaagcggttggcgtgagctgccggcacgtcgaagggcgcgaggctggccggcccgctgctcggaaccggggagccgaaaagatcaaagccatcttcgtccgaggcgagcaagccgtcaaaggctagctgatccaggtagtcgtcctcgaccgcccggctgccagcgacgaaggacggtggaccggcgagcgttgggcgccggtcctcctgacgcgcgtctccgtcgaggaggtcgaacgcgagctggttgacgtctgcgccgccgaagccgagcgaggcgagcccggcgccggccggcgcgagcatcgtgagagcgtcgcttccggctacgtcccggagagaggccaaaccggggcaggcgagctcgggcgagcgagatggagtgcggggcggattgaggttcggagaggcccgctctcgggcgcgtgagcttcgtctggtctctcgagcggcggcgcgagccaaactcaggcggacgaggagacgaggttgcagcctgccgacgagcatcagcaacacctctccgcagctagagcagcgcccaggactgtgcgtaggacctctttatgggaaccgctggcaacgctgctgataatcggcccttctatagcaggtagtttctccttccctcagcccgatccgaccgagccgctcgcttgctctcctcgcccgccgacggagccagctgagctgcttcgccaaccctccgtctcccgagacctctctccccagcgtcaaagtcggtctgatttctaacggctcgaggctttccaaatcttgttgctaaatgtctattgtcaacttgccttcgcttaggccttccaggttcatgccgagctcgtcaggccgcgcaggcgccgccgccgtcatgaagggcaagaagaagcctctggccaaggctcgccccagagtgccaccgccggcagagatccctcaccgcccaattatcactctgaatgcggtggatctggctgtccagcctgagggctcgactcgatcgagggtcccttaccggcctctcagcccgtcacccatcgtcctaagcccggctgccctcacatcgcctccaccaccaccccccctacggatccgggacttgtcgtccgaagcctcgacctctacttcgtccgatattcggcttgtaccaaacaaagacgagtcgcccgcctttgtccgggcgaaattggccttttacgacctgttgcgcaagggcacgtacctgtcgagaacgccggactggctgctgtcaacggcgacggctgccgtgccgggtcatcagccgaagtgggcatttcggcgaccacatcttgccgagccggccccggaggatgctgcggcgctcgagcagcggcgcgagacgatcaagcaggctgagcgacagcgtctggagcagcacgacgacgccgtccaaggtttgtgctgcagactcgtctgctttggatcgtttcgctgacgtagtccttccgcctgtcctcccacagacatgaacgagaagcttcatcacatcctcagggcgctcccgctgtcgttcgccccgccgaagtacagcggcgtatatccgacccggctctcgatggcgctcgctcttgcgcgcgagatggcggcgcttgacctcaagccgagcaccgacacgtaccggctactgatccagatttgtctggccgagcaggacgacaggctggcctacgtcgacggcaaagcccttgagttcgcctcgaaacgagactttgactaccagcccgactccgaccgcagcggcgacttccggccgtccgaggtcgatcggctgcggaagctgttcgagactgccagctggcaggagcggcgaccagacctgctcgtccggcataagcggacatcagatgagcgaacgaggaagatgcagacggcctggtacggcagcacggagtgggaggttgcctggggcctctacgaggacgccaaggtgcgcggcgtccacctcgaccgggacgccttgaatgcgctcatgaagctcgcctttatctcacccgagctccggagccgggtcatgggcgtcgtcggccaggtgccgagcccaacggcgggtaacacgttgcccgactcgaatgcccagatgatcgaactcctgatggctccccatctgcaatcccggacgtcacgctaccatcagccggctcgcttcaactcgctcatctctgacctcgaccgcgtcctgtcaatttacgccgactttcggagcattggccgtctgccaaccaaggaggccatctgtcaaattgcggcccggctagtccgtatcggctggtcgcgcgtcgctgtcgagatgtacctcgactacgagaagcaagacggaaacgagatcggcgaggaggactggctcgtcctcttgcggggcacgtgccgggtccaacatgtgcgtcgccgactttgcagcacttcttcctctctcccgcgcactgaccgtcctttctctctcacccttcgaaccggcaggccattgcaatgcgcaacgtctgggagcacgtcgtccacaccggccgcgtctcgcctgacaacgggctcgtccaagactgccagaacctcgcgggcgccgcgggtctgacggaactcgcgatcgagtgcctcgacctcttcaaggcgcgcgagattccactcgaggagtgccactacgcgccgatcgtcacggcatggacgcagctcaacgatctcgaggcggcctactttgcgctctcggcgatgcgggccgacggggtcgccccgctgcccgagacggctcggccgatcgtcagcctgatcgtcggcaaggcgaatcttagcgacaagcaggagcgcgagcaggttgcgagccgggtcgacgaggcctggtacgcccttctcgacagcaaggccgagcgcggtatcgtcgacgttgccgcggccaacgtcgtcatgcaggcctgtcttgcgatccccgactttgtccgagcgaccgagacattcaacggtgcggtcgcgatctgccgggcgtatttcggtgccgacgctgactcttgctgcaacgctgtctttctccagagtttgaggcgctcggcgtgaccccggatctcgacaccttccacctcttgctcgacgcgattctccttcgaccgctctcatcggccgagctctttgacctgctcatcaagtcgctcgaggacaagagtctcgcctatactccggcgacgtacgagcgcatcattgctttcctgtgcactcagtccaaggaggtctgggagcgcgacgccttcacgtacctcggagacctcgttgccgagacaaagcgcaagatccagctcgcccgccggacggccgccgtcggtacaaacgcgctcccaaccgacaaacccgtctttgggccgacctaccggacctacgacgtcatgctgcggaggtgtgcgcacgagcgcgactcgcgcgccctccagctccaggaagacatgcgctcctttggcttcacaccttcggccgagctcgcagtcgagctcgaacaagctcggctctggaccggtcaccgccgcccgcaggccggcggaccagagtttgacctcggggtcgacgaacgagggcgacgctttggcctcgcgcccacgcctcctagaccgagctcgatccagctcggccatctgccgctgtcggaggacggcgagattccgcctcacgtgcgcgatccatgagccgcgtcgccgtagcccttcgcgatggtcagaaaaagagcatgtcgatcactcctccccatcatctcactctggcttctcggcccgctcgcgcttgcgcttgctcttaacgcgatcgccgacgtcggcctctgcgctctcgatcggggcgacaaaagcctttgcgcgcttctcagcctggttgacgagcgaggtcgccgtctgctcctcggcccgcgccttcttctccttgtgctcgcgctccttcggtttgaggaagtactcgcccgactcgatctgcttgtcgacctaggtggaaaaattcgaggacgaggacgagggtcagcacgggccgaacgagagcgctcgaccacgatggccgccagaagcgcaccttgctcggcatctgcgctggcgggaagggcgtgtacgtcttgcgcttcttctccttgttctgccgcgccgcgccgtcctcgccgccctcgagctcgcgcttcttggccgacttctcggccgatgtcaggttgcgcttcttgaactctgcgcggcagcaggcgaaagatggtcagccggcgaggagcaggttgggcaaaagcaaacaacgcacgcggcaggaaccggtcccagctctcgttcgccagcttcgggtcttttgccagctcacgacggatcatgagctcctgcggaaatgtaagatggtcagactcaacatttctcgactggtcttgtcgcgggttcgacggaccttaatccggtatatcgggtgaatgttgcgcatgcagtcgacgacaatccggcggacctctttcaggctcttgaacgggcccatggcggtgacggtgttgccctggacgaggacatagcagccggtgagcagctcgatcgctttgagcgtcgacccgctcgggcccacgatccgctgccggcgctttgtaaagcgctccttgttgcggatcaggttgccaatcttgatgatgtcgcacgcgacgtcgtcctggaagatcttggccgcctgggcgagcgcgacgccacgggcgagcattttgacaaggtcgcgcgcgttgagaatcgcataggggtcgtacgtcttcttggtcgtccggaccgtcatcgagccctcgatcaggtcaagcgtgcagacgataccctgggtgcacgcagggcagtcgaaagtgagcagtgtcagtaggcgagaaacggccagtccgcgtcccaagctctgcggcggcaggcacccttccagaggggatgagcaaaaggccgaacctgcgaatcgagaaatttggtgacgtcgccccacgactcgcgcaggtactgctcgcggtacttcggaaacaggacagcgaatgacgactcctcggtgaacgggccggtcgactcggtcggcaggaaggggtcgatcttccactacagcgacgcaagacgtcattgagaggagtcgtcagtaacggagctcttgacctcgtcctaatcagctgagactgaactcacgctgcgggcggtgagtggaggcggcgaaaggggtcatggtcagatgtgcgagagggatcagctcggctacacgctcatacgccagcggcaacgacacgcactggtcgatgtcatccgtgtcccaggctgtggaaggcgagccggcagtcagcacgttgccccagaaggcgagcgcaagggaaggtcggtcgccagcccgcagccgtctgaggtcgacggcagagagctggccgacgagccccgcggcgcgcagaactgacgcttgtccttgcggtgtttgcggttcttgctgacttcaggctgctgctgctgaggctcgtcggccatctcggtgtcggacatgctggcggagggacaagggactgggtgggtcgagagcagggagagctcgtggcaacctctcgacgaaactcggccgcctccgcgcaggcccaaatcacctgcgggatgcatctggccaggtcctcgatgcacctcgccaggacgcgccgcccgcgcgtgagtgcgccccgcctcgctcaatcccatccagcccctacttgccctcgacttggcgaccagcccatcatcgcaggcccttctcgcatcaaatgtcggcttcgtcgcccccgcggcctggtcggcccaagcgccaggcgaccgactcccgagcgctcgccgccgccgtccaatacgacctcgaggacgagctgaggctctcgtccgacgacgacgacgacactgtcgccgtccgctacgccgccgccgccccgccggcccccgtcgccggcccgagcgtcttcggtctcgactcgaccaagccgccgcgcaagaagcccggcccaaagcctggttacaagcggccgaagccggcagccgcaagaccttcctccgacgcagcctccaactcgaccgcgttcgctgctgcgaccaaggccaaggcggcagcgccaaagcggcgcaagatcgaggacgcacttgggatgaccatcatctcggcgctcgagttcccgctcgagaacgagggcccgccggcggtaggcgccagcaacggcagcgcccgctcgtcgtcggcgaagcctggggccgctgcggctgacggcagtctgggcaggagcgcgctcccgtcgtcggccggcggcggtatcctccctctcagtaaggatggcaaggagcatccgctccaggactttctcaagaatccagccgtcgagcacctcagagcgcccaaagagccagcgttcgacctgcggtctgttaagacgtcatctccgcgtgtccgtgcgtaccgcttgctcccgctcaatatggcaggccgaccggcctacctcccatcgtgcgctgaccggcactgcttccgcctcagctccgccgcgaactcaggcgcgtgcgttcaatctgaccgaggcgccgacctactatccgtcggccgcagagtttgccgacgcgatcggctacatccgcaagattggcgaccagggcgcgcgcgactttggcatctgcaagattgtcccacctcccggctgggagatgcccttcctgatggacaccgagatgttcaagtttcggacgcggctgatgcggctcaactcgatcgaggcaaagtcgcgggccaagctcaactttctcgagcagctctcgatgtttcactcgcagcagggtaacccccggctaactgtgccggtcatcgacaagcgcgaggtcgacctctgggccctccggaaggaggtgacagccctcggcggcgaggcggccgtctcgtacggccgggcttggggtaccgtctgccgcaagattgcgctcgcgccggcctttgcccagagcgtccgcaacgtctacggccgcatcatcgcgccctacgaagactacgctgtgcgagccaagaacacgctcgcaaagatgtcgccccgcaagaaggccaaggcggccgagaccgggatgaagcgccggcgacggtcgagctcgctcagcacgctcccgaacgagagccccgtcaaggagagcccgggcaaaatccgccggcggctcgccgaggaggcggcccggatgtttgttgacggcgacagcgacctgaccgatacggatgaggagacgatccgcatggtcgccgagccgattgcgggcccgagcaagattgccgggagcagtgggaacaacaagcgccgcggtccgtctgccgtcgtgctccccatcctggcccatcaccccgagacgctgacctgctgtcatcttcacagcctcggtcgtctccgtctcgagcgacgacggaaacgccgaagatgtctgcgaggtctgccagaagggcgaccgaccgaccaagatgctcctctgcgacggctgcgacctgggttcggcctcctttcttactctcatccagccttcctgtcgctcaatgctgacctggcaaacgccgcggacacaacgtatgcaggcttccacattttctgtctcgacccgcccctcgaggacatccctgagaacgagacgtggtactgcccgtcgtgtctcatcggtaacggcgccgaatttggctttgacgaggttagtcagagaagcaacctgtcgcttagtcggcagtacaagtctctgatagccttcctgtccttgcagggcgacgagcactcaatctcgaccttccagaagcgcgacaccgccttttccgagtactggtgggccatgcatccgccaaaggcaaagatgcgggctcgggacgaagccgatcctggccccaacggagtcgagcgcgatgtcctgggcgttcaagtgtcggagcacgacgtcgagaccgagttttggcgactcgttgacagcaagaatgagacggttgaggtcgagtacggcgccgacattcacagtgcgttccttctcctctctcccctcgcgacgggcgaagcactcattctctgccaccttcttcgtttgaactctctgcgcgctgccaggcacggttcacggcagtgcggcaccgacgattgagacgcaccctctccacccctacgcggtcgaccagtggaaccttaacaatctctcaatcctccccgactcgctcctccgctacgtcaagacgcagatctcgggctgcaccgtgccctggatctacgtcggccacctgtacgccgggcgccagcctccagctcttacaccgcagtcgactgacccgcagatcctcccgcagcttctcggccttctgctggcacaacgaggaccatcacacgcacagcatcaaccacagtgcgtctcttcgtcgaagctcgctagccgggcagccgactgacttgtcgcttgcatcgcgtccacagtgcactggggcgagactaagacgtggtacggcgtgccaggcgcggatgccaagaagtttgaggaggcgctgcggcgtgaggcgcccgacctctttgagcaggacccagctttgctcttccaggtgtgcacagacgactgccaaacgcatcagtcagatcacgtgccgacttctgcccctcttttctgtgccgacagctcgtcacgctcatgaacccaggtcggctgcgtaaggctggcgttcgcgtctacgcgctcgagcagcgcgccaacgaaattgtcatcaccttcccgaaggccttccatgccggcttcaaccatggcgttcgtttcttccggcggggctcgtatctcgctcgcaatacagctaatctctttctcttcgacttgcagctcaactacaacgaggccgtcaactttgctacccgcgaatggctatcggacgacctcgcctgtgtccgcaagtgtgcgcaggcacccctcttgtcagggtctgccgttcgtgctgacgtgtctaacttcttaaccgacttgcagaccaggagctctcgaaggcgccggtcttttcgcacgatgagcttctcgtctcgatcgcccacaactcgccgacgatcgacacggccctctggctgacggccagcttcaacgagatggtcgagcgggagcttgaggtccggagcgacgtccggctcggtcctgtccatgtcgccgagacgttactcgagaccgacctgcccgaggagcagtaccagtgcgcagagtgcaaggtctttacctacctctcgcagatcgtgtgctctggctgcgacgaggtcttttgtcatggccacgcctcgcagccgtgctcgtgcgctcccggcatcgaccggacgatacgcatccgttatgccgacgacgagctcgagcagcttcgcgacaagatcgccgagaacgccgcgctcccaaccatctggcgcgagaagtttgccaaggtcctccagtcgggcacgccctcgctcaagagcctgcgcacgctcgtcgtcgaggccgagcagatcgagaagatgacgaccctttccgagcttgaccccctccgggcctttgtcggtgagtctatctcttcccagacggtcacccttcgcaccactagctgattgctgctcctgctgcctccgattttacagttcgctgcaatgagattgtgcaggaagccatcacgctcctaacccggaagcacaagagtcggaaggggcgcatctctggctttgagggcgaagatggtgaggaccggacgctcgacggcgtgcgcgaggtcctccaccaggcagatcgacttggctttgaggccgccgaggtggtgcgtctaagacagctcatttctctgcgttttccatcagctgaatgttctcgtcgtcggccgtcgcaggtccagctccagcacgtcctcgctcaggcgctcgcctttgttgaggaggccgacaagctgctccaggcttctcaaatcgagcactcgctcaccaaagtcgaggcgctgtacgcgaccggctcgtcgctcggcctcaacctgccccagtgcattgcgcttgagaagatcagcaaacgcatgcgctggctgagcgacctcgacgagattgacgagagctcgctcgatttgggcgacattcagtcgtatctcgacctcgcccggcagaacgacgtgcccgcggagcacgcctttgtcaaggtgctcgaagagcgtctggagagcggcctgacatggaagcgcgcagccgaagcactgctccaggtccggccttctcattcttgcccgtctcgcccgtcctgcttaaatgttcaagctgacggtgcccgtttgcgctttccctcaattgatctagcccaaggcctcagtgacgatcgagcagctcgagcagaacattgcgcaatcgaacgagacgtcgatcgataccgccgtcctccatcgcatcaagcagctccgacacaaggcaatcgacgtccagcgccaggctcgcacactcctcgaccggctcagccgagagggctttgtcttgaacgacgtgctgcgcttcctccagcgcctcgaatcgtacaagatcgactcggtcgtgctgcccgaggtggcgaccctccagcaggcgatggccggctttgatgcctggcacaggcggctcgcagagctgctcgatgcatccgacaaaaagggcgacattcagtcagagctgctcgactatgtcgcgcgcatcgacgcgctcgcttgcggcccagacgacgcgaccgacctcgagccggagccgctcccgccgatcaacgcgcgagcctctgcgccatcgacgcccctcgcagagggagactcgcccgcggccgatcggcccctgctcgaccacatctgcttctgccgcgccccggaagaggcgggccccaagctccagtgcatcaagtgcctcggcctctaccacggcgagtgtctagacattcctctaaagagtgtcaaggccttcaaagtgagccgcccgccttcttgcttgtggccctggccggtctgatgcgctggctgacgatgggcgttgcttgcactgtcttgcagcgctacgtctgcaacatctgcgacccgaagaagatcgaggtctggacctcggaaggccggccgtcgctcgtcaggctcgaggtcatcctcgaggagctcaaggacctgcgactcgacgccctcgaggcagagcccctgcgcgacgtctgtgaggctggccggcacatggtcagcgctatccagaccgtccttgccagcgcgccgcctccttcgctcgtccagcactggctgcgcaagattgagcgcttcccgatccacctcgaggccgtcgactcgaccggagcatcgcaggacctccgcacccagctgctcgctatcctcggcctcgacaagcgccgcacgcgaaagcaaaacccgcgctggcaggtcatcggcgccgcgccgagcaagaatcctgacatcgtccagtgcttctgcagcatgtacccgccgccggacgcggccttcacggccctatgcaacaaccgcaagtgtgcgtgtcgtcgaacgctgagcacatccccgattcgcgaggctgacgctcgcttcttcgtgcgacaggccagcagcgctttcacgcctcgtgcgtcctgatcccgccagagatggccgttcagccggccgatccgacgctgcctccgatcccgccgccgccgccaccgttcgagcggtccttcaagtgcccgctttgctgcatcaagcagggcacgcgctaccagcatgccgagctgcgactgcagatggagggttcgtccgtcgagacgtcgtcgaggctgagagctgttcggctgacttggacgtcctggtcatgctccgcagaggatcttggcagtcagacctatgtcgactaccggtcgacattgagtctcgtcgaggtcatggccaagtttatccggccgccgcctctcggcgcttgtatcaccctcgtggccacggcgttcacgccaggcgtcaagggcgaccccaagcccgtgcccgactcgccggcggcggggtacggcaccggcctctccacccatggcaacggctctggcccgagcggctttgcccgccaaccagcgcaggctcagcagtcacacgggtcacaggatatgtttggcggacctggcgttgcggcgccgtacggatcgcaggctggcgtctcgctgccgaccgggccgatccagtaccggtcgctgcctccaccgccgccgacggtccggtctcctgcgctccctccgccgccggggcgctccgagcagcaagctcggccgccacccgcaaccgcccttgcggcgacatcttctttcgcttcgatcgccgcatctcccgttccttcactgcacacgccgtctgccgtgtaagcagccccctcgccttcgactgcccctcgctccgatttgttatactctttgttcggcccccgtgctgtgatgcgatgcccgcctggcgtcccagagactcgctgcatcgttcagcatttgcgctgggcgtgtgctcgggctgcagcgcgaaaagagccatgtgtcgttgtctttgccgaagagactgtcatcacccgcgcaccacacccggtgcctcttgatctcggccatggctcagtgccagccatcgttgccggccgtggactgtcgtttgaccgactgctattgctgttgcgagccagcaggtgggccgtgcccgcttgcgaaagggttgagctgcgagtgctgcgcggcggcagcggcagccgcatgtcgggggtcgtacgtctggtgaggctgcaacggctggacgagggtcgccaaaccgtcgcggtgatcgtaggcgtcgtaagaagacgggccctgggatggataggctgggtaccgtgccgttggcccgctgtaggcttggggggggctcatgatgctcgcgctggccggactcagcgggaagcggccgcggtggtcgtcggcctgatgcgagctgcggccgctgccgtcgtcgacaatgaccgacagcggctgagatggcggtacaaagctcgacggcggcgggccgaagcgctgcgtcgagggcatatgaccccagccgccgagctcggccgcctgaccctcgaggtactcgagctgccagggctggttgaccgaggcccgcttgccgcccgcggcgccattctgctgctgctgctgccgccgctcccactcgcgcatcatctcttcgcggttcatgacgggcgtgagcgggctccggccgccgccgggatcgacgccgagctgggtgacgcgggcgatcgaggccgggacgaggtccatctggttgatggtgttggctctgctccggccggtcggctgctgatagtagacgttcgacggctggctcgagtggtgggccgcggccgggaggggcaagatgttgccggatgccttgcgctgggcgtaaggggtcgagctgaggcccgacgacgacgcgctcgtccgtagagtttgctgctgctgctgctgcgacatggtatgcgcgtgttgcgcttggagctgctgctgctgctgctgctgctgctgctgctgctgaatgagccgctgctggttgctgtagttgaccgaggcgtcgtcggacggggcaaagggatgccgatagacggaagcggccgcctgggctgcctgctgctgggcaacttgcgtctgatgttggttcagctgctggttgtatgctgccgcgtccgcataggctcgcggcgcccgtgacgtcgttgcaactaaaccgccgtacggccggcgagggtcaacctgcggcgtcgggacgaccgcaaccggctgcacctgcttgatggaggccggtacaggcgtcgatagcgacggctacggcgacgggacgagagcgatgcagcgatgaggtcatcagcgactgcgagcggctcggccagagggtagagacgcacgttgaacggcccggtgaacttctcgcccgtgatgaacggatgccgtcgggcctgcgatggcgaccagcgcttgatcgggtccatgttgagcaggccgaggcaaaagtcggtgaatgacgaccgcatcgccatctctgcagaagaggcgcgcacgacgtcagcagcggggccttcccagtcatcggagcgcgggccgcgcacctcggtctatgtcggcctgcttggccgtctttttggagaaggcgtaggtacggatgatctcgggcagggcctgcgccttgaagtactgcttgctcggctgctcctttgtgttgtgctccttcgagtattgctccatcgacttgaagcggaagacgcgcccgccagcgtagacgtctgggttgggactcgcattgaagaattcgggcacttgcttgccgtgctcgagcagatgattgggcggcatcctgaagcagggagtcgacgttggggaaggtcagcgactcaggtcggctccaagcgagggctgagcggcaaacttgcccgagcatatcgatgattcgcgacagctggttgtactcgctcgtgccgggaaacagaggcaggccgagaaagagctcgacggcgatgcagccgagcgaccacatgtcgatcgcggtcgagtacggcagaccgagcaggacctctggcgagcggtagaagcgcgactggatgtaggtgtagacggtcgagtactcgtggcaggccgagccaaagtcaatcaccttgatctgcggcgactgcagactggaggaagcagccggccgcgcgggcagagggtcagcatcaggccagccttgccgttcaatcaggcggcgcacctcttgaggagaatgttctcgggcttgaggtcgcagtggatcaggcgggcctcgtgcagaacctccatcgtgtcgagcagctgcgtcgtgaagaccttgacgagctggatgctgagcccgcggaagccgttctgcttgatgagctcgtagaggttggacgaaaggcactcgaagacgaggcagaggtgcttgcggtggatgaagtgggcccgcatgcgcaggatgttgtgctcgtcgttcgggtcgtactttgagttgagctgcgggcagagggaaagaggagcgtcagcgcagcagctcggccggtttggcgatggccagcccgactggcagcgcacctcgtcgaggatcgcaacctccatcatgctctggttgaagtaggccggcttgttcttgacaactttgacggcgacaatctcgttcgttttcatgttctggcacttgacgacctggccaaacgtgccctggcccaggacgtcgaggatcaggaacctgaagcgggggaagagtaggaggcagccgtcagcctcggacgcagagcaaggccagatgtcctcttgcgccctcacttgtgaccctcctcggtgccaaggtagtcgttgacgtagaggatgtagtcgttgtcctcgttgtcgtggccgtcgttgaggacgcccttgctcggcttggtgagcacccggcgagggttgtgcgcgacctcgtaccgaaaggtcgggttgcaacgcccgtacgtctgcgcgagcgacgacgtcatagcttcaagcggacgctgcgggtagaagacggacgctcgtcagcgggcgcaagcctgacagaagacaggagaagtcttttagagacccacgatggctgcatgacgcggggtccgtccgcgaacctcctcggccgaacttatccgccggaagccctgctgcggtacctctggcgccggtggcggagccatgtggctgtctcgcgcgcccgggtggtgaccgtactgagcggcgacctcgagtgcgcccggaggcgggtgcgccgagaactgctggaaggttgcgtcggacgtgcgatgctggccgtggaagtggatcgaggaggacgaagccgagcgctgctgaagcatctgaggcggcggcggcccttgctgctgctgctgctgctgcgagtaagcgttcgcttgcggcggctgcgggggaggcggcgcatgaccggcgttctgcggggcgtagggattgctgcctgcgttggccggcaagccgtacggcacttggtggttgggcgaggctgttgatgacggcggcgtgtaggccgcctggtagtgttgctgttgctgctggggcgggaccggtgacgagcgcatctcgatctgaggcgtcgaccgcgggctatagtcggtccaagaagaggacggcggctgggcgcgaccgccgaacgagggcgaggcgccaggcccagacccacccgagtacgagtagcccatcggaagcgacgttgatggcggcggtggcgcatgctgcgatggactggccgggatgtaagggttggtctgctgctgctggtgttgcgacggtggtggcggcggcggcccgccgggtccggtgccgtacttgagggccgagatgggctgcatctgctgcctctgcgcctgttgtggcggcggcatctgctgatggctcgcgagctggggcgacgtcggaaaggggttgctcgtcatgtgcggcgactgctgaacctggagcttggccgccgcgtacgaggacggcgacggcggtggcgcgccatgaaacgacgatcggttcgactgcggaggcgggccgtgcgacgtcggcagcatgccggtccgcatgagaccctcggctgtcatggagctcggatagagctcgccgacgcttcgctggtgctggtgcgctccgccaaaggagggcaggccgggtgaacctggcgggccctgccggccgctactgctacttgacgccggagggccaggtctcccgccgtagccggtgtatgccgtcggctggccgccgtggcccgccagatgcccgccgtacgggtcctggtaggagcccgagccgttaacgtgaccgctatccgaggtccaggcaccgccgccttcaccacctgatgaggacgcgcccgggtcgccgagtgcccgctcgacgtcgtcgatgtggttgccgaacggatcacgcttcctcgcaccgccgagcgacgcgctccgggcgagactgaacgaggacgccatctcggtctgcgcgggcggcccaaggaaggagacggggcggagaggtctccggagtggctctggcgggcttcaaggagaagactggctcaagaacttcgtcggggcgggtcgaagacgggcagcgaacgaggcgagccaggaggttcgagcggtgcgaccgtgagggggagcgaccggggcggcgggcgctagctagccgcgcagggacgggcgatgggaacggcgccgggcctctgatctctcgcctcgagtgtcgtctgagcactgtcgcgaggtccgtcacgcaagagcggtcgtcgtcggatcgagatgcagactggagaggaggaaagctacgaggatggatgaaggagatctgagggccaagaaggaggaggcgtgctaggcggtcagcctcggcgcggcctgcagacggccgccggcgcaagagtcgccccggtgcctcccagaaggtgcgctggactgactttgcgagcgtattggttactgaacacctgctgtgtctcttgcgtctcttgcgggtcaggatggtgcttgagtgctgatcaacttctcgtctcgcccgggccgttcggtcgcgcccccatcacctccgcgcgccgagccgactcgcatctgccgtcgccgtgcgcgcgcagcagacccaccggaaacgactggcagcaagttgactcattcgctctcgtcccttcaagcgcagcgccgacaagtctttcaaatggatgacagccccctgtagccgcctctctactctggtcggcgagggttaaatcaagccaaccgccgcgtaggagccagacgaccggagccgaaacgcccagctgaatctcgccatgccgcttgccatggcgcgatgccaggtcgaccaagagcacctcacgatggcaacaccctcgaaagcgggtgaccgcaggctccagagctaagtggacagtacaagaatgctcggagagagtgctgacatggtctggcagaggccctcttgactcccgcccgtctggcccgcaccgaccatggcttgcccgttcgctactctcgccgcggaaccctcgcacccattctcgagccggcccgtgcaccctctctttcgaccagcctcgacgcctgtcgcgtccgcttcgaactcaagctcgagcggctgcccgttttcggcccgaaacgcagagagcagcaaccggcctccggcggccttcattcctccgctctcagacccgccgccgatcgaagactcggtctcgcttctcccgcctcacccatcggcatcttcctccgctacctctcccggctcgacgaggcttccagacgttcttcccgccggtccgcagcctttgcgtctttcggcgtcgcatccgctcaaaccgtcgacggccgcgatccactcggcgcttcatagctttcgagcgctgacatcggcatacgcctacgagtcctacgaagacgctttcaactggcccgagcttgagcttgggctcgataccgaaggcacttggtcagtcacttacagccttaagatacttgatcgaaggcagcgcactaaatcgtcttgccctcaggtactgcgtcgccttccggtcgaagcgcatgcccgggacggagaatgacctcgcgctgtacgaagccgacaaggctgcgcacgaagaggcattcgacaacggcggagtgagtcggtgttggaggccgaccttgcaagagggacctcgtcgctgatctgccgcttgcttgacgcgaccaacagctcctgctgtactggtacggtcggcccgacgtacacggtgtcaatctggcgacgtgcatctgggaggtcagtggactcttatcgagacaagtcgcgtccttgtcgctgaccgacccctacatgtacccttggcagtcgcgagcccaagcccgactcgctaactctcgcccgcaccacctcaacgcggtccgtctgacggcgcggtcgtacgagagctatactctcgagcgctataccctgcgcaaggttgcaggagagcgggaagtgcgtgtcgagccctacgtcgagcgggaggccggcaagggctcggccgtcgcgctgcctgccatccggccagcgcccagcgttgagcactgaggccgatcgctccctcctctatcgatgctgttgactctggctgggcaaacgacagcggtactttgacctagtcgaaggtgtgaagcgaatgtcatcgctcgtctgccgtcccgcgcgatgcctcgcaatcttgcagcacggcagcgatacggtcggccgcccactcgtcctctagaggcgatacccgagacaagagctgccgtaacgggtcgagctcgtcagacgccagtaggcgaaagtgcggagagggttccgtagggttcggatgcgagaagtcgaggactgtcagcggttccgaggccgcagtctgggaggatcggttctggcgtcagccgccagccactccgtgacttgagattctcggacaggacaggctcactagggaaccgccaagcaatcgcggcccgaagcgaacgccttcacagtcctcgataaccggcgtgccctgctcgcccgtcatgcgcacaaagacgtcagtctgccgcgcgcggtgcattcggagctgccagcagccgacgtcgagtgtacagccgtcaaagccgttgatgagaacgctgccctcaatgttgggcgcgagcaggaggcacgacgtcacgtcctggatgtggagggccgttatcggcggtggccgtggcgccgcgggcaacgatcgaggagcgggtaggaggttgatgatacagtgcgagattgacgagagcgagaccgagaagccggacgacggcaatttgttggggagcgtgacgtaggcgtttgagagggacgacagctcgatgttgacggttgcgttgacaccagctgcggcggacgatggaagacaaggcgcggaaggggccggcgctggggccagtgccggcgcagggcgagctttggacggagcggccttcttgaaggcaaagcgagatctgggtttcgcactcgacttcttctgctctagcaaagactcaaggctcttgagttgctatgcgaaagatagcggacgagcggatcagcaggaggagggcggcctgacagagcggggcggctgcggacgcacctcgtcgacccggcgctggtcgtagcggggtagatagtcctcggccatgacgagtgccttgcgaagcttgacgagggcggtctgagtcttcgtaaacgcctctgcactgggcgaagctgcctcgagtgcctgtgcaacttctgctcgggcaagggggttgagatcagccctgagcgcggcttgcaggggccggcgggcgcagccaggcgagcgagtgaaggaaagagaatcgcaccgctggacgccgacttaaatgaggccagaaagtcggccgagagctcccggttcgacatcagtgcagagctcgagcagcagcagagatcaatgagtcgaagggggtcaggggcaagcgggctcgagccgatgcgagctctggctctctcggcctagttcgatgcgagtcgcaggtttcagaatagcctccctcgccaactgcatggcagcgcctgagcatgctcgactctcagccccgcctctctccatcgtcctctcttcccccctgcctgtcctcttctcttcccaagaccgaatctcgctctcggcctcttaagtcaaggcttgacctccctcacgccatgtcttcgcccaagtcgttctctatcaagggcctcggcctcaagctcacctcggcggccgacatccagccgcacctcgacgccctccgagcactcggcgacgacgtcgaggaggtccacctcggtggcaacacgctcggcatcgaggcctcggaggcggtggccggtgtcctgaagacgctcaagtacctcaaggtgcgtcgcgtgatgcctgagctggtgtctctagtgcagctcgctgacagtaccctcacccgctctgtcacgcgcctgtcttcgccggttgccttcccgcgctgtcgcaggtcgccgacctcgcggacatctttaccggccgcctcatctcggagatcccgcaagcgctgacggcgctctgcaactcgctcgctgagtcgacctcgctcgagacgctcgacctctcggacaatgcctttggcggccgctgcgcggagcccattgtccccttcctgacgagcaacctctcgttcaagcactttatccttaacaacaacggcatgggcccgaccggaggcaacatcatcgccgccgccctgctccagtcggccgagaactcggctgccaagggccagccctcggccctccggacgttcgtctgcggccggaaccggctcgagaacggcacgtccgagctcctgagcaaggccctcgccgcccacggtcagctcgaggtcgtccggctgccccagaatggcatccggatggagggtgtcgccaagctctcagccggcctcgccaagaaccccaatcttcgccacctcgacctccaggacaacacgctcacgctcccgggctcgcgcgccgtcaccggtgccctgccgtcctggccggagcttactgagctcaacctgtccgactgcctgctctcgcgcaagggtggcatcctccttgcaaccgccctcctcgacggctcgagccccaaactcgagacgctccggctccagtacggcgagatggaccgccggtcgttcgagctgctcgcaaaggcgatcaaggtgcacggcagcgcactcacgacgctcgagctcaacggcaacgtcgtcgatgccgacgacgagtcggtcgagcagatccgtgccgccctcaagggacacggcaacgccgaagcccttgacgagcgtacgttcacgcccccaaccagcccttttgtccgccgatagtcattaaggcgagctgacaggattgctcctccgtctcgcagtggatgacatggaggaggacgagggcgaggaggacgaggatgacagcgaggaggccaccgtcgagtcggacgacgaggagccggctccggcaccgaaacctgctgctgctgctgccgcgccagcgaccttgtcagaagaggagacgccggccggcgtcctcaacatgtcgatcgacgccatggccgatgctctcgccggtatgacggtcaacaagagcgcctgagcgttgggtagacgatggcaggcgaccggatatcgcatggactctcgtcggcagaccctcgagcttcagaagggcgaaagagggacggcgggcgtgcaactgctgcgccgtcggcagtcgagagtcgccgcgcgttgcgaagccgcccttgacctcgtccttgccgcttcgtccgacgagctcttcatcacccatctccctcagcagagccctaagccaaccagagcccttgtcgctcctttcctgccgcgcttgccacggtccagatcgtcttcaagtcgcctggcagcttgtcccttcctcagacctcggctcgtgcctctgcaccatctcgcggctcacgccgcccagctcgaaggccccccgtcggcctgcttttatgtcgctcatcccacctgcgccgtcggagatggcgtctggctcgtcatcacgaggtcctccgaccgacctgagctcacggcacggcggtccccctaccgatgcgttcagtccgcccgggtcgtcctctggcggcgtccggtcgctgccctccttcaacgacctgcagcagcaggcgacgggctcgcctcgacgcccgacgcggtcggtccgccggcctcatcagccctcgagctccatcacatccggccaggaggctggacggccgtcgtcgcccggccatgacccgctgcagccgacgtgggatgaggagcgcgccgagcgcgaaagcgcgtcggcccgcctcgccaacggctcccaggccagtgcgcccgacgtctttcgcaaggctcaggccagcaaggcatttgtcagcgccgcaagcggccggaatgctgcgagcagccggaagaagagcgcgccggcgattgatccggacctcgagggcgactttggcggccagttcgagggcatcgacggtgcgcctcgcctcggctcgctgtgacggcgaacttccgaaggctcaatctcctccctcttgccctccctgcttcagacatcctccatcagatccgctccgagtactcggtcgtcatggagccagaggtgcggccccctcgtcttcgaaggctcgtgctgcgacgctaggtatgctaagtaaactgagcgtcccgctacccgcgcagttcaacccaatctcgctcgcgcttggccttctcgggtcggactcgagcacgcgctatcactttcagcagctgtcggactcgcttctgggctcgctgcagtcgaccgtccaaacgcactctgcctcgtttgcgtcgtcaatctcgacgcacgattcgtttcttggctcgctcgcccagtcgcaacgtgaggtccgcaagaccaaggcgatgcttgtcgaaactaaggaggcgctccgtggcgaaaagcgagccgagatcaacgccctttcgggtagggcccgcgtcatcaaggagatgatggacacgctcgacaccatgtaagtcgggccgcacttcgctctctgcgcgacatctagctgacaaactcgcaacgttcatctgttttccagcgagcagctcaagtctgttcccgagcagctggagacgctcattgcagagaagcggttgctgttggccgcgctcgtgctcgtgcgctcgatcaagacgataagcaagcccaccctccgcgaggtcggcgccctgtcggatctgcgcggatacttttcaacgcaagaaacggcgcgtctcttgctgcggcccttcgcgtgggaagggtactctgactgacagttgctcatcgtcgtttgcagacgctgcgcgacatcctgctcgaggagctgcacaaccacctctacctcaagtcgtcctattgcgagagccgatggactccctatgcgaggggtcagacgaagcgtcagtctttacctcgtctttgccgagcgccctcctctcagctgatgccgatcatccgctccagtgtctgaccctctggcagccaactcgatgaccgagcgctcggtttcggcggcgacgagtgagcccagtcgacccgcgtcgactgcagacggcctcgccgattcgcgaccctcatcggccagcgagaagccgaccctcctggcgcgctacctcttggatctcgccatgcggccgtctcaagatcctctgctcgacctgccagaagacttcgacctgacgacgccggcgcacgctcgggccggcttcggcctcacaggaggcgtgaacccatcgggaggctacaccggtgggagctccagtcaggccttcaaccccgaggccgactccttcatctacatcgagcacctgcttgaggcccttgccgtcctcggccgactcggttgggctcttgacgcgctggcgcagcgcgagacgggcgagatcttcagccttgtcgacagcacgctcgaagaagtcgaagagcggaccgtcgatcgccggcaacaggcgacgacgaatctcgttccaacgagcgccctctttctcccgccaccgccgtcgtcggcggacgacgaggtcgagtatgacgagacgcagccgacggcgaccggtggcaagctcgacgaggacgccgagacccttcgggatctcttttggaccctgtactcgaagctcgacgccgtcctgcagggcttcagggtgacgtcggaggtcgccagccggatcggatccgtgcgtcctccaggtgcgcccggtcgaagcatcgattggaggctaatcagagcaaactgcacctctcgctccagcgcaaagagttcaaggacaactcgtactcgatgcttcgaaacggggccggtatggacgcaaccgacgtctggaggccgatccagacagaggtcaagagtctcctgcgagagtacttgacgagcagcgatccgaccgtctttgccacaagaagccaagtctcatcgatcaacgacatattgcgcgatggccggtcccagcgcgaccgatccaaggtccgtcatatgcgccagctttgtcgtccgtctggccctgcgttgctgacctagctgcttgacgatgctcttgcacagagcctgttccgactcgccaactcggacggcaaggccaaccggcggacgctcaagcggcacgacgaagagctgactcgggcgctccagtcgtcgctgccaggactcgccggctctgtggcagatgccggcggcgagcgcggtgtcgccgtcgcctccctcgaggaccgggtcaacggcgctgccggttcgcaccgcttgctcgtcacgcccgagccgcagctcgtctcggtcgtctttggcccgacgctcgcctttctcactcgggctgcgtccgtgctgccggtcaacctcgagaacgagtgcgttcgatcccgctcgcttaggcctgcttcgtgagctgccggctgacttttggcactattcttctcgcagaaactttggcctcgagacctatgtccaggccgcgtacgagacgccttcgatctcaaaggacggacgatagcagactctgcatgccgtcacagcactcgtcaaggtccggcggaggagtgcgggaggtgaacggccgcggcaccgacaggcgtcgctgcgctcaacgtgctacgccgcccccctccgcggatgacgtccggcggcctggagacatcgggcggtgctgaggcatcggtcatcctccgacggatggagagcgcgggcgatcggttgacgttgggcagaaggggacgcgtaaaggggtcaagccactcgaccacctcgtgctcgaagagggacgacggcgagagcgacatcggcgacgtcggcgacgcagtctggccgactgctcggggcgagacggggagtgaatttcgatgcaagtgtgacggcgtcatgggccggggcgaaggctgcacagagggtgccagaggcgactgtcgtccaggtggcgaccgccgtcgggcagggatctgctgctctcgcttggcattggtccgtcgcccgacgaccctctcgagttcagccgacggtgcaatgccgcggaacgacgcctcatccagcacgtccacccagctcgccgccaagtccaagggctcaaacccccagtgcaggtgctcgagcgtcgccgattgtctcgcacggtctccgagggcgattccagtgaggcgccggaaccggtcgtcactacggagagcctggtctgaaaaagcagtcgccgctttggcgaggtggtagatgtcgagccggttgaatgctggctgctgctgcgaggccatcatcgcgagtgtgggcggaaccagcgctgtcagaacgcggagcacgctctggtggactgcgagcagaggaagagttgacggcctgtcagacattgcgcgtgggctcaactcgaggacgacactcaccggcctcggatggggcacgcagccagacccacgtggtcttgggccgacttgaagtggacggagagcccttggcgaagccgagctggattgacattggcggaagactgacagaccggatcgaaggcgctggccattcgagcacgacgtcgagactggccagagggacgcgtgatcggggggcggtgcccgcctgcgacagggaaaagacgcaggcgtcagcttggagcgcagccagaacgatatgcaaatgagcgcaccaagaaggcctcgacggatctccaggaagtcatctcgtcgccctggatgcgcacaaattccttggcccaatcaagacggtcgctgcttccgtcgttccggcccgagtgcgcgtgcgcagtcaaacgtgacacccagaggggtgactggaagcagggctggcagtaggatgctggacgggagcgttgcaagggaatgtgtgccgcctaggagtagtaggtcagtcgtggccctggcgagcggcgagcggcgaaaggggggggggtcaacgtaccgcgagctgaagctcaaaaagctgcagcggacgaagtttttccagtgaggagaccaaggcaccctgaaaaataagagacgaagcaggtcaacttggggtctttctcatcaggcgacctgcaaatgaacgcaccgtcgccgcgttgatgaggtcgtagtcgccaatctgggccgacgttccctcctccgagaggtcggtgctgccgctcagagaccgaccgagtgcgtctggaccgtgcaagttgatgctcggcaccatctgactgcttccttggccggggggaggactgccactgacaaccctgtgtagcaagacgcatgcctcgggcaacggcccgagctcgtccgcattttcggacgccgacgaggagatggagccgagcagcgagtaggtgacggacttctcggtcgtgaccgagaatgaccggtctcggactgggtcggtcgacaaatccgtcgtcgggagtgtcgacgaaatagtcgagggtgtgacgggccgttcgcccgggctgaatgcgagcaacgaaggcggagagacatctgccggcagtcgtctcgctgccaagggcgagccgtggctggcgacgcgcaggatcgagtcggagcgagcagcagacggggagccccgtaggttgagctgtgacgtcgatgaccgaagggcagagccggtaggcgttgccggtcgacctccgacgagggggacaaaggggaaggccagaaggtcctctgcggccggcgttgacggcattgactttgtcgcgcgctgctggcttgtcgacggcgcgtgcgagaggagctcagccgctgcgctgcttgacctgccggcgtcgatcgtcctgggtcggcttgagaactcgtagactgtcgagccggccggagagggcaaggggagcagattggccgcgcgaaagatatgctgcttggcctcggcgggctgtcaaaaggcggcaagaacgtcttcagccgtcaatcgagctacaagatgagcaaggtaaatcaagcgcaccgtccagctccggcgtacggctgtctgcagccagacgtcgagttcgaccacgcgcaccgagactggcacgaggtcgtcgagctcgacaaaggcggcttgactcagtcgtccgttttgagctcgactggctgaccgggcgagcgaggaaggcgagggctgaggtgagggctgcggcaaaggaaggccggcgagtaaggaggccatgcggaggaagctctggccgcgagcaagctcgagctgaagggccggttgacttgcgttttcgttggcttgacgggtggtggtcgatggcatctcatcctctggtccagacgaaaaagacccctcccctcatcgggtgacgcattgccggcgaggtcgtttgagtatggccgcgaagggtcgccgtcggcggccgaattgcggggaaacggagaaaaaggggcaagctctcctgacgctgatgctgaccaatccgcgccggtgcgcagcagcgtgggccgcaaccagcaggcatgacaatgtcgagaagcacagcgccggagcagatgcggatgtgacaggatgcgaagagagggtttgaacgtcggaggatcgtccgtgcgagggaagacgaaagagaagggcagagagcgaaggacgaaaagcaggcaagacggagagaggggctagttgccggtaaagagggtgatgaggaggaacagactcgatgcaaggaagcgctggaagcacggcggcaagtcagtgatacgctcgtaagactgcactgcagagaagagtggacgacgcacgatgccggccatgccggcgacaaagatcaggatgaagagcatgtaggtcgcctggcgcgagccagagttgctgatcgaagcgtctcccccgctgagaatggcgaccgcgagcagaccgttcgagagcgcccaggcgaggaggacgtttgtccggaagttgcggtagtagtcgtcagtctcctgcttgccacgcgggccctttggcttgggcgctgccggcacggctggcgggtgcttgcttgcccgaagcgaagcaagcgcctcattgtatggctggtcgagatcggcctgagcctgagttggagagtttgaggcgtcagtgacagcggcgaggaatgttcagtgttggttggacaaacggtcggtagcataatctcgacctctttgcccgagcccttgacagagccgaggtcttcgaccggctcgctgtcggccttggtgccccaagtcaggtcgtgcgtgttgcacatcgcaaagattgacaggacgttgacgtaggcgggcgagctgagaagcagggcggacgctaggctgtcagcgggatcgcgatgctttggtccttccccaggctcgacgtacagtaggaggtaacccaagctcgacgtcacgagatgccaagggtcaagagctaggcacgaggcgactatccagcactggatagcagtctgatgcatcagcagatcgcccggtccggaagcaggccgaagggagacgtacgccgaaagtggccgcgaccgagacgatcgtctgtgcaaagatgcgttcgccaacgttctggaggccaacagcggagcggacgtcagggcacgaagagcttgaaagaagtcggtcgaggccactcacggtgacggccttgacgagaacgaggacgctgcagacgaggagccaaacttgaagggcaccaaacccgtagatggcgcaccggtaccagatcttggagcccttgggccggttgccgagcgagagcaacaggcagctaagaagcaggccgacgtagatgtactacagaggtcggcagtgggggtgggcgtcagaggcagaatgcgatgggcagggctgccgcgccaccagacgcacttggcagatcatgttgaagaccttaacgcccttgagcccgaacgaagcgtcctcgaccgaggtcgtcaggatgacaaaaaaaatgtagaagttggcgatgccaaaccacgaaaagacctgcgaggaggggcagaggtcattagccctacggaaacgcctctcgcgagcaacgcgcgacgcacgatgttgataaaattgaagaaggaaaggaagaggaggctgagccggcgccagaagccgtgctgcgagttccagagcttgcgactgttccaaatggcatagaccgacgaaaagactggggcggggcgaacgtaagtaggtcgtcgtcaaaggcagtatcagggcgacgcacgggatccgttgagccagcgacggcgctgcaaaataaactcggtgaagtcctggcgacaaaatgggcaggtcagtctcgtgctccgcccaagccctggcagggaccattgctccggaccgacgtacctctgggacatcggtctcgccgacggcgcccttaacgtagcgcagtaccctgacgagtaaatcgagcgatagtcgggtcagcacaatgaccgatcgcagccacatcgtcggcgtcggacggaccaaggctctgaggcgcagacgagctcaaagcagaggatgcggtcctcggcgaggtacatgttgcgcgtaaagacggagccctcctcctggagctcggcacggaagtaggcctcgagcgggcccttgccgtcgggtccattggcgagcgcccggtagcggtaggccgagaaggcgcctgggaggacggcaatgtagccgaagaccgactcggtaggcttatccaggatgttgctcatcttgtactgatcgtgtcgcgggagcgaagagggaagaagcgtcagcgggcgagcgcaagaaggagcacggtcgaaggagggcgcacctcaaagttctgggcttggacgagctgccgggccagatcgagagcagaggggtaagcggcgcgacacgggtagatgaggtccaggcgacgcaccgggttgagcagctttctccagccggacccctggtcggccgcaatctctccgcaggcgccgccgacgttagatgagcggtcaaagaccttccagagctgataaattgacttgggcccgggtttcgtgccgacatcaagcaggatacagactgcaggagcaggcgaaaagagcgcgtcagcaccaaaagagcgaacccgcaagggcaggcgagcgcgaggaccgactcaccgttcggctggaggagcgggcagaaggcgttgaagaaccagcggtgcgagttgaccttcttggcgttcttctccttgagacagaacatgatctggcagggcatgattgccgtcttgccctttgcgccaaagtcgtacgcgtagtcgggcgtcagggcaaacgaggtcgtgtactcgaagaggtgcgcctggacggacaggtcgcccgggccggtcgtcttcatcagacctgtagagcaggagtgactggtcgtcagcacatgagcgagcgggacgtaggcagtccgagacaggtaccgaccctcctggtaaacacccaatgcggcgagcacatcgagtaccttcggatgcacctgcttccggccgtcggcgacaatgcagacgaccacctgaagagagatagaggggctcggtcagactgctgcatgtcgttgacggcgcttggccaaggccgcactttcttccagccgtcacggccccagcttgagttttgccgggcgcagaggtggctgatgttcttcatgacgccgtagagggtgcggagaaagaggacctcgtcctcgttgtacatcgtgatgacgatgaagagctcagtcttgcggtcgttggcattctgccggagagtaaagcctttggcggcaaactcgtcggggccgcaagtgaccgccgaatagctagaggcttgcgaaggctcgtcagcgctcaatcgactcgaaaggaggagaggggagcactcacgtcgtccgggtccgctcggtgtcgcccgagaattgcttgagcaaggtcgccaagccagacgggatcggcgcctggacaacgaggttgccgctcgaggtgagcttgaccttgcgccgcgtcttgttgcgccggaggatcttgccctcgggtgccgggccgaaatgctgcgtcggcctgacctcgtcgtcgtcgtcgtcgtcgtcgtcgccgaggtcgccgttggcaaggtcctccaggaaggccgccttctcgccctgctcaaagtcagtcggcggcagcaggtgcttgaacgtcgaccggtcgacggccgtccccgcaaagtgttcctcgagcgagggtgatcggccgccgtcgccgaggtcttcctcgagcggcggcgtcggcgagcgcgaccgcaaccgggccggctggttctcgccgtagaggtttttgggcgtgaagcggtcgtagccggcgtactgctcggggtcgaccgcctggcccgggtggtaaacatgcggctgttggtgctgaggaggcggtagcggcggcgtttgctgctggaatgaggcgggcgaggtggccgaggggtagtagtttgacgagacggccgacgagccggcgggtgagcgtcgaccggcaggcaggacgccgttgttgaacgcggcgagcgtcgcgtcaaataccgaaagacctgggttagcaatcggagagagtgcccgatgtgaagggagctggtacgggctcgccgacgggtggtacgactgaggcggaggcgagaaggcgtggtggatgggtgagtgcgacggcgccggcggagcgtaggattgctgctgggcgggtacgatccgaatctgaggagcagcatcatagccgccgcccatgccgtagctcatgccagctgccgggtcctggaaaggattcggatcgtcgtaggccgactgagggagagcgccgtactggctgctgccgccggcagggccgccgccgctggtgacgttgacgccgtgacctgcagcgccgtagagcgcctgaagacccacgccctgcgggttgggactgggcgatcttggtcggtctgggtagccgagctcaaaggcctcttcatccgagatgggccccggcgactggtggccgaggtagggctggtgctggtgctgggttggcgggtggggtgacgacggcaagggccgcgatgccggccggggcgggggctgctgctgctgctggttgccatacgggtcgggtgtcgacgaaggcgagggcacgtagcccggcgccggtttgcgatacatgctgacgaaagtaagagagagctcgggcgcttgtggctgagagaggaggacgctgcgggggccgaccccctcccttatgttggctgagcccgcggcgccgaaaacaccgcgcgtcggcgcgcgcgggacgcgtcgctgacttggccacagccagccacgaaagccctgcccgcctggctggccttgccccacgatacgacccccgacccaccctttgttcttcctcacccgaacccctttatccatccaggcaagagatcgacacagaaggagtcgaacaaggcgccgtccaaaggttcgtccgtctgccgaaagaggcgaacaaggccctcagccaaggcgcgaccggctgctgacctgacccccctcccgcctcctcctagcctcctcgccagcaagcaactgggttggagggattgtcccatctcactcaacatcgagctctctccaggccccttccctatctgctcctgctctcctccgatctctcctccgatgagcgccgtcttcacgacgacgccgaccaagccgtcgctctacccgccgccctcgtcgacgccgatgtacgccttcgagccctacgtctccccctcgtcggctgcccaccagcgccacctctcggcctgctctgcagcctcgcctccagcggctgcaattgagagccgacggaggcttcgctcggccgcgccgtccatctcgagcaactcgcaccatcgccgggtcactggctcgctcaacgtcggccacccgccgccaccctcgggccgggccgcctcgtttgacctgacgcctgtcggctcgccctcaaagcagacgccgcccagcctcggcgccttccgtcgagctgaggccgccgccggcgacgacgacgacgacgacgaggactcggtcatgcgcgacccgtcgccgctccggttcgcccagcccaggcggctcggcgcgaccgcctcggctgagcgtgagctcgccatcgtcggcgggagcgccaacaagggccagtattgcgagtcgcgggccgccggcctcgccgtctcatcctccaacgaccggctccgcttcgacgaggctgccagtggcggcggcgggggtggcggcaactcgagcacggaggagggctcccggcgcgggtcgctcgaggaatccgcgtctgcatccctcatgccgccgcccgtcaagagcccccaccagcgccagcgtcagctgacggcctccaacacgttctgcctcgactcgcccgtcaagaaggctcccgtcggctctcagttctcgctctcgaagccgctcggccggccgctacagccgatggtgacgacgcgcgcgcggagcggcagccgggccaagcggccagcggcgagtatgatgacgggcatggacgacgacaacgacgcctgcatgggcggcgacgaggatgccgacggccatggcgggcatccgatgcccgattttggcggccgtatgcgcctctcgagcggtcgggccgacgagagtgacgacgacgacgacgacgacgacgatgacgatgaccccgcgggcggggccaacgcgacgcccggccgctccgccccactgcggccgctctccttcagcggccagctcttctctccggcaccaggagccgccgccgactcgcctcggctcgacggcagccgacaccagcgcgcactgactgagcaagaccccaacaagccaatccgctcgtcggctctctccaagtcgggctcgcacagctcgcacgcgtcgtatggctcggcctcgaagctcgtcgccgacgaggacaacatctttctcgagtcggccgccgaggccgcccggacgcggtcgacgacgacgaccggcctcttttcgacctcgacctcgctcggccgctcgcgctcgctcattggcgccgacgggaaatcgcccgctggcaggggcggcgccatctctggctcggccatccagagttcgtcggcgatcgctaactcgaagaaggctgtcagcatggacaacctccaggtgcccgggctccgtgacgcgaacggcgccgagctgtcgtcgtcgtcgaccgctcctccctcggcctttgggacgcagggtcgctcgctcgcccgctcgcgccggaccggcatcctcagccagtcggtccgcgcaggcaacagtcacaagcgcgggtcgtcgcaggacttccccgtccagccggtcgcacgaccggtcgggacgaccaagtcaaactcggcccagaatctttcggctcatcttgccggcggcggactctcgcagtcgtcgtcgctcaatcagctaaccacgtcgaattcggcctcgcacctcgccggccggctcaaggccgaggcggcctcgtccgtcttgaacaggtcggccccggcgacatacaaccggtcgccagatgagctcgacgcgctcgccttcaacgacgccaagccgctgctcgctgccttcactgccaagcagtcgctcggcaagaagttcaagccgcgcgatagcggggtctcggtcgatgacggcccgctcatcgactcgcccatgacgggcgccggcggcgagggcaagatgatgcctcccgcggcgccgcatcggctgccggtcccgctctttcttccttcgcgcctgtcgacaacgcagctctcgataccctcgggcggcgacgagatggacctccaggagctcctgacgccggcaggtgtgccgtcaagcatgagcggctggcccggctcggcctctgccgctggcgggccctcgctctcgagctcgaccgggtcgacgacggccttcaacttcctcggccccgaggcggccgaggcgatggcgagcgcggcggccctccagcacagcacaggctcgtcggccagcaaggcgatgcccgacacgcccgtcaagaccaagtcgtttggcggcggcgctgggcatgcgactcatccgcatccgctctcgctcgcctcgatccaggccgagggtagctcgagcggctcgagttcgccttcggccgctgcgggaccaagcaccggcctcccgctcctcggcagcacctcgcatcgccactcgctcaatgtcctcgctcgctcgcaccggccgtccgacgctaagccgcctcacctccggccgctggtcatggggtcgccagccgtcggcagcgcctcgcccgcgccgtcccggtcgctcatccccaagcggtccataaccttccggccaaagccgtcgtcgctccaggctcgcttcacagcgacctctccagagtcgcagacgggctcgtcctcgccgccctccggcggcgcagagtcgcccaccttcctgcgccgcgtcagccagaacggctctctctcggccgcggcggacgccgccagccctcggaccggcgcgctggccggtatgccgcggcccgtcgtcgatggccagcagcggatgacgagcctcctgcgccggacgtcgagcggcgtctcgggcatgagcgggagcgagagcgagagcggcgtcgagatgacgccaacccgacgaggcctggattcgatcgcgcgcagtacgtccctcggctactcgccctccccttcgaccgaggctgaccaaggttctgctctcccgcccacaggcccgcttctcatgaccaagaacagttcgtcgcctatccagagccgcaacgaccaagagctctcggtcgcggatctcgtcggcccctcgtcgacctcggctgccgctcggctgcccgagtcgtcatctgccgcccttcaaccgcggcactcgatgccgaacctcccgccaaagttgccgtcgtccttgcgccggcttcgccaccggccgtcgcaccctctgccgcaggcgatgcaggacgaggacctcttcgaaaagcgcttcaaggtcgtcgacgcgctcggccagggcgctttcagccaggtctggaaagttcaggagcgcgaggcgacaagcgaccgcgtctgggcgatcaagcggaccaagggcgtctttgagggtgccaaggacaggttcgtcgagctcgaccggagatgtcgatccagagccaactgctgaccctcagtgcttcttcgtccctccagacttcgacacctcgaggaggtcgacatccttcgctgcctctcgtcgccggtcaacgaccacgtcatcgcctttgttgacgcctgggagcagaaccggcagctcttcatccagactgagctctgcgagctcggcaacctcgccttcttccttgaggagtacggccgcctcgtgccccggctcgacgagagccgggtctggaagattgtgcgcgagctcagcgacgtgagtgtccccatcttgttggttctccggcgattcgcgcccttgctgaagccgtcccttcacccccgcagggtctccaccacatccactcgcacaacatcctccacctcgacctgaagccggccaacatcctcatcaccgccgacggccggctcaagattggcgattttggcctgtcgacccgcttcccgcgagcagacccagccgaggtgctccgcaacgctggcctcggaggcgaggtccctgccggcctcgccgacaaaggttgggaacgcgagggcgaccgcgactacatggcgatggagacgctcagcggcaactttggcaagccggccgacatctttaggtgcgtccgcgatcagccctcgtctacgcccagccttgcctgttctgacacccttctcttctacccgacccagctttggcctcctcatcctcgaggcagcgaccaacatcatcgtcccggccaacgacgcgccctggcacgccctccggtccaacgacttcaccgacattgacctcgcgccgctctcgccggccctgattgacctcatcacgctctgcatgcgggccgagccgctggagcgaccgacgatcgatgacgttgtcggccacccggtcgtcggccgcgctcggaccttcggtcaggccgcactcgtacccgaggcggagccgttcctcgtcgagctcctaaccggccggatcgagccgctcgcgaccggcggcgaaggcagcagcagcagcgagctcgaggacgtcgagatggtcggctgaggccctcctctcttctcatcggcctcgcccactcgcgctccacccctcttttcttcgacttgtgcaccacctctcctcaggactctcttaatccaccgcttcccccccttttgtacccgtagcttacagctttcgctcccgtctcgctcctgctgccctttcctcacgatttgcaacctcgctcccgtctcggcgcgcctggtcgcccgccgccactgtgtacccccaccccatgacatgctccgtctcgtccgtcttgcacgccggtggctcggtcggccgagggcagccttgtatgggctcgaagtcggccgccgctggagcaacgcgaagaactcgcgctgtggagcgtaacgaagttccgattaacacgcccttccggttcatcttttcccgcggcaacgacagcgacgggaaccacttctcgtcggtcccaccccgagacggtctgccgtgcgaccagtcgctcctgacattgccctttgacgcggcgtcgctcgccaaggcaacattggaaggcgtgccggccaggccgtgcctgcaccggcgaatccgacaagcgatgcgccctcacgcgcaggcggtcgtctgggaacggccgtcatgctgctcgcgacgggcctcattgtaactctctggatgggccgagcaatgcgcgagctggagagaacgtcttcatgatagattggcgtgactggagagaggggcgtgaggcaggcaaatgggcggacagtgtgagcgagcaggagagacagaacggagatgggctcgtcaaagaggaagaggaaagggaggggcacgagggcctcagcagtcgagcttgaaaagtacgtcgtcgtctgcgccctcaaccggcaggccgtcgagcccagcaaggacgaacgcccggtcggctcggtgctcggcgacccgctgggcatgagcagcagcctcacgctcggctgtggacacggtgacggtaggggtccgaccggcgcctgctgcggtcgggcgcgagaggcctgcgggccgaggcgtcgtgttacttgccgtagagggcggctgggtagaccggaggcgcgctgtgacgacaccggctgcggttgctgttggggcgcgaggagtcggaccgacagcagggacctgccgggccgcagctggccttgcagaagacgccgacgggtcaaccatcggccgctgtcgcgccgctaccgtcgtgagaggagtggctgcgaccattcggcgcgggacggctgccgcactcgaagcgccgagtctgccagccggccggcgggagggtgcgccaggacgtgcggcgccggcagccgcgggagcgatggtcagcgactttgccgaggccgctcgctggtgcgatttgagggcggacaggggaaggttgagtagggcagcgaggtcttcatccgagtctgggagggacgaaaaacagagtcagtcggcgagcgaaaacgggcgaccgtcgtccagagagcggcgcaccgtaagcgccgtcgtcgtcgctgctcgcaccggcacgcgcagtccagcggagcttgtccgtctcccaagcggccgactcccagccgaccgggctccggctcgcgctcacccgataggcgacctcgaaaccctgctcccactgctcgacgacacccatcgcgcggacggccttgccaagctcgactgggtcgtccacctcgtaagcgagcgagagcggctcatcgtacgaggcagacgagaaggtcggcatgtactcaatctcgagctcgtcggccgcctcggcctcttcggccatcgctggcgcctcggcgaggtcggtcagaccgcccgtcggtcccggtgctaggtcgagctcgaacgaggcgtcggcggggagcgtccggtccgtcggggtcgagaagggtgcagcctgctgctggaggggcgtatgcaacttagaggagcgccgccgggtcgtccgtgtcgctgacggcagcggcgtctggaagacggcctgcttagccgccccacgggttggtgctggcgtcgcgaaggcggccgcgcgctttgacggtggcgctggcgtccggagcggctgctgggcgtggtgtgagtgcgagccgttcgtgacgtcgccgaaggacggcttggtcgaggcggctggggcgaacgtcgtcgacttggagtgggggagggtcgagcccgacgggccacaggtcgactggaaaagccggaggggggctagagatcggcaggggtgaattggcactgtcagcgacgtgtccgataagtaggaaggcgggagccgtttccagatggccggcagcagggcgcgtctcgagggggacgcgtcgagaggagggacgcaccgatgttgccctcggcatcctggccagccgctcttcccggaccaaggctcgcgcccagacccttcctgccagtcgtcatcgcgcccttgctcaccgccgtcagaccgccgcccttcccgaacggcgtctttgcgccagcgcccttgccgacggtccgcgccccgcaatccttgtggatggcgagccctccgcgggcaggcgtcttggatgacgggtagagattttccttgtgcggcgcatggtaggccgtgggatggggtgtcggtctcgaggagagcatcctttcgtgtgagaaaagaaggaagaagaagaggggtggcgcggtgatggtctgcgatgagggcccgacgacaaggccaggagggagggcgcgaggaggcgcgcaggcgggcgacctagggttacgagcgcgcgcgtggccgatgatgcggccgagggcgaagcgaagcgaggccaccctttctcgccctcgctcgacacccacctcgacatccctcctgcccgagctttctgatccccgctgccaatgtcctagtgcgtatgagcctgctgtacgagagagagagggatgttgcggaggctgacctggctcccaccgtgcgccttcgccgctctccgcagcgccccacctgcctacaccgacgccccggcggccaagaagtcagcgtcgccgctgacctcgtaccaggcgaccgatgacggtgctggaccaagcgcggccgctccgctccttggagctcagcgtgctgccctccagggcatgccgggcgcgaccgacgacgacgacgacgatgcgatgaaggttggtcgctactttcgccaccgcccgacccttcccttgcctttcgctgatgaccgagcgaccgctcccaatccagtatggcacgagcgtctcaacctcggcgcccgagatccgccaggcctttatccgcaaggtctactcgatcctcgccttccagctgctcttcaccgccgcctgctcggtcgtcatggtccagccggcgacgatggactggacgcgctcgcactcgtggtttttctggatcccgctcgtcggctcgtttgcctcactctttacgctgtgcgtcctatgctgcccatctgctaggtataacattcgagactgaccactttgaacgtcccaccggcttcaggatggccaaggcccactcgttcgtcccttccctccacctgcgacctcttctaacgagcctcgcgtctgatcctttgccctgtctgtgctctcaggtaccccctcaacctcatcgttctcgccgtctttaccctgttcgagggtatggccgtcggcaccgtcgtcagcttctacgagagccggatcgttatccagggtgcgctgccccgcgctgtcactcttttctctcgcatcaaccgaccgctggctgaccttaccctttgccttcagcgctgctcatcacgctcggcgtctttgtcggtctgacgctctttgccttccagaccaaatacgaatttgacggcctcgcgccgtacctcttcggaggcctcatggtcgtgcgttgtccttgctcctcttcgcgccctcacgacctggcgactgaccacaatcctcgctaccagctcttcacgacgtcgatgatccaggtcttcttccccttcagcaagggcctcgacctcgtcctcgccctcggcggctgtctcatcttctctgggtgcgttccacttcccttccctcgtaccttgtccccgaacatacgtttgctgacgggacgctctcttgataaggtacattctcttcgacacgcagcagattatgaagaagttgtcgcccgacgaatacatcatgggcgcccttcggctctacctcgacgcgatcaacgtccgtacctttacgagcaactttgctgtcactgtcgccctccgactccttctgatgctgacgaatccattttcttttctaatcgtgcatttgcagctcttcctccaggcaggtccctcgtcctgcttctctctgcgctccgccgtcgacatctttctgaccttactttgtccctcccccctcttccagatcctgcgcgtcctcggcaactcgaaccgtgactaggcgagcgagccatttcgtctcccgcccggcgctcttctgaccgacacacgcaggccagcttcgaacgaccccctctgccctgttctgtacgacaccttgtctccgttccctgcgcttagctctcacatgacccttcctccttctgagagtgactcggccggcgactagccgagcgagcgagccgacaagcactcaagcataaccggccttggagacagacatcgattcaaccatctcagcaggcactccctcggccatcgggttgcgcatcgggcagggcatcaggctcgacagctctgaccttctcgcctcccgccaaaagcgagggcccggcggcagctgactttctcgaaagcccgctgtcaagtcaacaggtcagggtctcgtccggttcgcacggccatctcgatgcgagatctcggggcgttgacgaggttcgatgctagacggcctcatcgaccgagggcgagaggtctcgaggtcgccgagaggtgagggccaaggacggtgcgggctcggcgggcggaagcgggctcggagagttgaggccgataggcgacgatgcagggcaggacgaggccgaggagcccgggcaagcggacgggcacgggccgcgggctgcttgaccagcagggcagactgcctgcttcggcggcaggtcaggtgaagggggcgcctgctgtgccaagtaaagaggcgagcgagcgctcgtccaagcagacaccttcgatccggcccggcccgatcgtgcggtccatcttccgtttgctatgggagcggcggtctcggacgtggcggcgtcggcttggtgcttttcatatacgatcgcggcctctcggagagtcgtcgggagaggcaaggtcgggtcagggccgatgagcagggggttggccggggcaggatcaagaaagtaaggttgccgagggctgagaagggagggtgtgtgtctcgctcgccccttacttcgaggcagaggcaagatgggcagcagggcggagcgggcaggccgtcaagcgcgctccgtctctggccgagatggtcgaggccggcggaacaccatcccgtattccggtcagggcagggaaggtcagcgacaaggcgccgctcagtcgagaactgtcggtcgagcttgatggcccagggccagctccccgccggcccgaagttgaaggttagagctcagagggtttggtcgagatggcagggcccgccgcaacgggtcagcagcgaaggggcagagggcctgcccgagctggccgcaaaggcgaggcggaagtcggtggccgacgacaaggtctcaacggcggctggctgcccgcgagcttatattcagcgcgttccatgaagttactccaacgcctgtcgccttacggcccgccgcgctttacaggcgcggatgcaggaattcatgatcgagctcgacaagggatcgtgatggaagtcgtgaagagatgggcacgagggtgactgatctgcagtaggggaagaacagggctaagggccagggcggtgacaagacgcaggctgggcttgcgagaccggtcgcagagggtagcactaaaggacgggccgttggcagcagccgtgatgcgcttgctgctgctgctagccttgttcccgatggcagagacgatcatcgataagggcagtcgacatcgccgcttgcgggagaggtgaggaggtctgggagatctttgggcccggcaacccagtacaagagggagggatgagcgcaacagagagcgaacgctgcatgaagccgatgcgggtttgactgaacaaaagagcacctgacgctcgcgtggcctcgaggtgcgggccgagcttacggttgcgggcacgacagggcgtgtgcgtgtgcgtgcgaagcttcctccttcccctgcgtgcgcgtcagacaaaggatgggcggcctttgggcccacgggcagatcaattcaatctgggcccctgcgcgcctgtctcgtcgggcgaggctgcgcgcggcgcaggagccgcggcggcgtctcggcgggcgcgggcgcgcgcgcgcgctctgacgaaaggagactgcagagacaaggctcactcccctcacacccactcctggatcccctcccatcgtcctcctctttcctctaaaggctgctccctggcggacgtcttagatctgctcttccctcccatccacacctgacccacccaaccagcaagtttcttcaagcgccaccccctccaaccgaccgacactccttcaacgcccaccttccttccagctcaccttctcgcatcggccaacaccctccccggccacctcgatcggacagtctctcgttcggccctctcccaaatctactacttcagcacccggctccgatctcgattcacccagccccgcgatgtcgtcctactctgcgactgccggctacccgtcctcgctcatccctcgggcgatgcacgaccccgagctgctcgacctgctcaagcagggcgtcaccaaggagcagatctgtgcgtccaccttccttcccgtcccttcccacttcttccgatccgatcgccttactgacggcctccctccctccttctctcctgccctctttgcagccgccctcgccggtaaggccatcagcgtcatcgtcgtcgacgcccctcagtcgtcgttgccgacgccgccgtcctcgccgaccaagtcgacctacgccgactcgccctcaaacacgatcgacgttgccacgcccggcctaccatcgctccagacgttcatccagcagctcgttgagcagtccaacgttcagccgtcgacgctcctcgtcacgctcgtctacctcgagcgcctcaagtcgaagctgccccgggtcgcaaagggtccgtcctcgttcatccctgtccctggtcccgaccttagccccccgtcgctgaccgcctattccttatcgtaggcatgcactgcacccggcaccgcgtcttcctcgccgccctcatctgcgcggccaagtacctgaacgactcgtcgcccaagaacaagcactggcagcgctacggcgccctcttctcgctcgccgaggtcaacctgatggagaagcagctcctctacctgctcgactacgaccttaacgtgaccgaagaggagctcctcatccactacgcgcccttcatccagtcgaaccgcgagcggcgcgctcggcgctcggccggcgtcgcctcggccgtcgagagctcgtcccggcgctcgatcccgcgcgaggtcatccggcctgcaccggcagcgaccgccacgcctccggcgcttgaccgatccagcggacactcgtcgtcctcttcgtcgtcatcgtcatcgtcggcctcgagcagtcgatcgcagacgctcgacgagagcgcgatgcgcactctgacggcctcgctctcgacggccaagcttgctgcttcggcccgaccgacctacgtcccgacctcgtattctgcctcgcacctcctcccgtccctgccgacgctcagccggcggacgtcaacttcgagcactgcctcgtcctcgtcgtcgtcctcggccgactcgcttccgccaccagcgatcgttctttcggccgagccgaccctcgctcagcagcgggcgatcggccactcacgctcgagcagcaccgcgagccgaccaccgccgccggcgatcaagccccggggctcgttcgccaacctcgtcgcctcggctggcgggtggagtcggctgatgggcggcggcaacggcaccggcaccggcgcgaccaaggcgcgcgatcaagtgcgcgtcgagggcgtcgacgaccgcgagctcgcgctctaaaactccctcggactcctcacctcatctcgtgcctccaagcctcttcgtcaacgctgtctcgtctctctcttccggtcaagctctccgccctcgtctctctcctcggtcacggatcgtcgcttgcaaaggatggctggacttttctcctccctgcctgcccgtcgcttcccgcctcctcgtgtttgttgtactgccgatctctccgatctcgtcatatccctaccctcctccctccccctgtcgaataatgtccgcccatctaccctctagagtcgctggtcgatcccccctccctcaccttcaccaaccctctcgcggatccccatgccgccaacacccaataacaatcaaactttgcgcttcattgaactcgctcgacatgagctcgccctggcagaagctcgtgtggagggtcatgtggccacccgccacgacggtcgaagagccaactggccagctgtctctcccaccccttcggtagtcgtgctctgcctgcttctctgcccgctgcccccgctgccgccgctgcctgcgacccgccgctcaaggtcagccgcctctcagccaacctgcccctgctcgtcgatccggaagcagagaccccgtcggcttgcgctttccgtggccggctgaccgcacgcgtcatgagtgaccctgcacatggaatccggacgacgcgcctcctctgttgcatcgggggacgaccgtatccgtgagagcagaatgcggaagggaggggacgctcacgaccccaatcggacgttcgtatagactcggtcggtcttcgatcagcgacgacttgcctcggagagatatcgcaagacgttgacgagccccgtccgttgcatcgtcggcggcgctgagacccgattcagcgaccgagatcgcaacgtcgagtggttcgaaggggaagggagacgacggcacgaacccacggcggaaggaaactcgcgagaacgcgagttcgacggaagcgccgctcgctcgcgttgattattgttcgaccccgcttgcagggcaagggcaggccaaacagagaccacggcccgacttggccgagagccgtcgggcttcggcagttcggtcagtcattcgctgtcagtaaaatgttgacggatgacggcgtggcgtgggcgcgttcgggcagacagaaggcgacagtctgctgccgtcgcgccgggcctttgagggccgaagtccaagttgaccccagtttgggactcctgcccaggagtcgcgcggggacacgagaggcatgcccgagccagcagcagcttgacgcctcgctccctcgcaatcagcagcacagcaaccccaccttcctccttgaactcgccaggccatgtctggcttccgcaagctcgacctgagcaagtttggcggcgactcggacagcgacgacgccgccgcgccggccccgaaccccgtccgccctcctccgatgctgctggtcccggctcttgctggcccgccgtcctgccagctgtagaggagctcacaccccccctctcgcgtcttccactctcggaatcggctctgcttctcttactccgctgctgcagaagctcgcgctcggcgtcgcaaagcaggcaaccttctcgcacggcattcagcgcaagtcgaagcgcgacctcgagcgcgagcaggccaagcgcaagcaagaggaggaggagcggtcggtccctctcaccattcaccttggctttgacccgacccagctagctgaccgtcgcaacatcaacccctcagtgaggctgctcgcgtctttgccgagtttactgccgactttgagggcgagagctcggccgcaggcagcggcagtcgaccgggcggcggcttcgtccgcgcaggcggtcagtcgccctacgcctatgctccttgtgcggcgtacagaggctgacttgctgttgtcgctgctttgacaggctccaaggatgcctatgtgccgtcaaaggcaccggtcgaccgcggaccccgccgagtgaggcaccgccagctgaattcatgctgtgtcagagagccagcactgacccgttcttggcctcaccatcagttccgcgacgactcgcctccaccggcgtcgagctcggcacccaagccgaaaggcaagcgcgttatggatagctttctagaggatctcaagcggtgcgtctggtctcggttgcggagcgagtccttgacagcatgcatcacagcgaagctgacctgacgccctcggacttgcgttcagggaccaggcagctcgggaagagcgcttcaagaagagcggcggcgtcggtgagtcgactacgcgtctctctgcctcgcccgaaggtcaaagtctgaccgccctcttgcggtgttgcaggcggctcagtctcggtccacgctgcctgggagcgcgagcgaggatcgcacgacacgggtgactgcgaggtgcgcgcgtctcgcagacctgaccgacgttttgctcgagctgacctgaactctctcactcatccagactaccaatgtgtttgtcaacaacctgcccgaggcggccaaggaaccccagctcggcatgctctttgccaagatcggcccggtcgggtccgtcaagatcttctggccgcggttcgatgagcttccgccaggggccgacctcaacgcgctccagtcgcgccgagtcgggccaaaatcgggcctgacgggcttcgtcgcttttatgcgccggccggacgccgagcgggcgatcaaggagtttgacgggctcgactggggagggagcgtccttcgtgtctcgtggagcaaggccgttaagctgccggctcgaccgatctacggtgagtccccgggcgcgccatgtcagcgggaggactagcctgctgacgacccaccgcccgccctcggcgcagtgcacccaagccagagccaggcgagctaccccgctggcaagcggccacgctcgcgttcgcgttcaccgccgcctcataagcggacgcggtcgacctcgcctccgaggcagcccttcagcggcgagcctcgctcgcctcccaagggaccacgagccatgatgcagcctacgtcgcagccgcccgtctcagcgggcccgcgcggaggaggcagcggcatcagcagcagctaccagccgcgcttcgacctcgaccctgagcaagagcgttacatccgcgccgtcgccgagcgggtccggaccgtcggcggcgcgttcgaggccaccttgcgtgcgcgcgagggcatcgagggcaagtggcggtttctcgatccgctggccgacgtgcgtccgccccaatgtcccgaggcgtgagctgtttggtgtatccgactgacacacccggccttcattcgctcaggcgcccgagtgccacttctaccggctgcaagtcgacccgctctaccgaccgccatcgcccccgccgccgccgttcgccgatgagggctacgactcaacttactcgaccgaccagtccgaagcctctgaggacgagcgcctccccaagggcaagctcggcaagctcgcccgaaggcgactcgtctcgtgcttgcgcggcatgcggccggagcgagggagcattgcgcgcctgatggccctagcgctcaagcatgccgatgcggctgacgaggtgcgccgcgctctccgtcaccatctgctagcagtgccttacgctgctgaccgggttctttacctccaaggtggccgacgtcatcgttcaaagcctgaccatctttgagacgccggttccggtcaaggtggcccggctgcacttgatctccgacatcctctccaactcggcctgtccgctcccgaatgctgtgcgttgcgctttgctcatcgcgctccgatccacccctgctgactgacaaggccgatctcccgcagtggaagtatcgcgatgtctttgaggcgcggctcgctcccgtctttgaccactttggcgagctctaccagagcttcaaggcccaggctggccggttgagcgccgaggcgttccgcggccaagtggcggccgtgcttgacgtgctcgacctgtggtgcgtccccctgacctttcactcagcctgtccgctcgatcgttgacgtcgtgcggtgcggactcggaacaggatcgtctttccgccgacctttacccaggacctccggctccggctcgccggccacaagtcaaaagaggcgccggacccgtctgcggctgcggcggctgcgctcctcgccgaggttgaggcggcgctccccgaccaggcaccggctgctgccgccgccgcgccctcaaagttcaagaagtcggcgtttgcctcgacatttaccgacgcggtcgtgccgccgctcgcgacagctccggtagctgccgccgccgctggcgaagaggaggaccttgacggcgctccgatgagcgaggacggcgaggaccttgatggcgctccaatgggaatgggaggggacgacgacgacgacgaggatgtcgacggcgaggccatgtgaagccttgcttgtcaatcttgactccttccgttccgatcccatgatctcctcgactcgctacgccgtccccaggtttgacgactgggtttaggggagttgtactggaagggggaggggatcctgtaacgacgacacgcccacaatagaagccaaagtcagcgctgctcggcccccctccctccctttcacctgcccccgttcctcccttctcttgctttcctctcttgtgtgtattccaaaatgtcctttttgccctttcttcccttgctctccgtcgtttgccgcacctcttcgtcgatcgcctcgggccaaacgggtcatcggagggagctcgtccgacctgccgcgtttcgtcgggggcgagaccacgcgcggcaagcctcagccccttcccctccctccgaccgtctgctcttggcgaccctcttttcttgtccatcttacgcctggctttgctttgctctaatgtcagtccgccctgagcctgtcatccctgcgacgacagctgcgaccgacgctgactccaagccgctcatttcacttgccgcgcacttctccggtctctctccttctcggctcgctctgtcgcttcaggtcgcctccgacgctgccctacgacctctactcgcaggtcagctccttttcgcgctttcaggagcattagccagcgctgacaacataatctttccgatacccgaaaccctgcttgctctatcgctcggcgtcctcgacctcgccccctccctggtctcgttccttccgcttcgacgccccgccctttgccgcagatcgtccgtgcggcgatccagcgtcgtcacgcctacaccttcagcgaggacgagacggaggaccttgcggcgaatcgccgactgctctacaagctctgcctcgtcaaccgcgacttcaaggtgaggaatgctcccggctccgctccgccgaggcggccttggccatctgctcggcgtccaccgcctgacgtcgctctcgaaccttgccctgccgctcgcagaacatttctcaaccgctattgtttcaagaggccgtctttcagaagaccaacgtctttccgcgggatccgaaggaggttcgtcccatcaagacctcgccgcgcagctccggcctgcaattagcgctgacccgtccgcctgcgatccttgtccttctccaggaggagcggccgtttgccttctttgacagcatcgagtcgaacgagccgctcggcggccacgtccgacacattctcgtccatggcggctcggctcagatttcgtcctacatcctctcgtgcctgcaccttttgcccaacctcaaacggctcagcaccctctgctggcacctcgacctgccgctgcccgaggacgtcctcgactttccgctccggaaaccgacgccgcactgcatcacgatcgatctcggccggttcgcctcgccaagctacaacatcatcatcggaaagtggtttgactttgcgcagctgaagaagcgtgcgtccttgcccgctcgctccctcgccgccaacctcccgactctctgctgacgacggcaaacctgaccctctctcagtacaccttcgcaacgcgcatcacatcgactttgtcctcgacgccatcctgcctctgctcgttgacgcaacaaacctgaccgacttgcgaatcgacggtgcgtcttgggtggtcctttggacgcaagcctgcctgctgacgctgtcccttgcgcgctctttaggcttcggcacgacctcgcaagaagaagaggccattctcaaggcgctgaagcaggtcggctcgggcctgacgacgcttcaccttcagtcgctcgggacgcccgcccggctcgacccggtcatccttgagctctgcccggagctccaacagctgtcgacggccgtcggcgacatctcaagcttcctcgcctcgcccgcgaagcatgaccggctcgagacgctcctgctcggccacatcccgcggccgttcaagccgacggcaaggacgctccaggcaaactcggcggcgctcgctcaggcggcagagcagctcctgccggtctatacgaccggccacttcccggcgctgcgctttgttggcagcggagggctcgactttggcaagctcggcagcaacctcggcggcggcagcagtggcagtggcgctgacgacgaggagagcgcgctgatggcgaccgtctgggccgaagtcggcgagacggcccgccggctccggcaggtcggcctcggcatcctcgaccgctatggcgaggtcctcgaagacacggccgggctcgcgcaagccgtcgacgagcagcaggcggcggcgccgtaacgttcgcacgcatacaccggcttcgaacggccaagcggcgacgtcggcctcctcggcggacagccgtctatcgaacccttctcctaatcttctgtggaccaagcaaccggacattttatctttgtatcgatagaaacctcccttgtctgcgacatccgcttcggacccgctcttgcgagagacctttcacccaggccttccgttggggtgagcgtcgtatagcaccgccagatggacggggtcgactggctagggctcgtgggctgtctcgagcgagccgatgatacataagcgggcggtgcaagcatgtcgcgccacgtcggaaccgacaagtgttgtcgcctgtgcggccttggcgggagaaagagaggaggcagaggagaacgctgatgacgcgcggggctgagcgagtcggccggcggtgagaagcggcaccgcctgattgggttgggacgcggacgaaacactgcccgaccgaaagggggcgtccgacatcctgctttggcgttggcgtcgcgaatttgccgttgccgacgaggcgtctcgctcgccgggacggaagctttgaaccggtcgaccggcgggaggggttagggaggttagcagagttggaaggagacggatcagcggtgccgtctggcacaggtcggtcgggtcatgagccggtcgtctgcgctggtgccaagggaggcgttaggccggccagcggtggctctagcaggcgagcgacttcgtcggggctgctgctgctgtgtatcggcagcaagggggcgtgagtcgggtctgcgacttgcgcatgcacatcggcgagagcgcggttcgacccggaggcggcgtttactcttcgctgcacagccggcggcgtcggttcggactgacctcagcgcgtcctctggttggctggttacagcagctgggctggctcagggctggcagagcggtcggtcggcagcagaggcaaacgcgcccagactgaaggacgaaaacgggtccaaggcagagggacagaggggccgcggccgccgtcgggcgcgcgggacgagtttgggcgcgcgcagcaacagaggcggcagtggccgtgtcgctggagggaggcgcaatcgaggacgagcagcgagcagaagcagcagcagccgcgacaacgtacaagccgctcggaggcagggcaggggcagagcagcatgcatgctgagcggtgcaaaaggccagcagcgaggcggtggaagccgtttggctgtgtcggctcgttcgggcttttcgatcgcaactcgctcgcgcgcgggcacagggcttggcggcggcgggccctctgcgcgcgcaccgctgctcggtcgagcatagcctcgcaggcaagtcaaaaccagttgctcgagtcggtcgtgccttcacctcttctctccacccacaaccgtcagcaaggcagcaccaacaggcacctctctccggtcgcctcacccccttcctccaccttcctctccggcgcctgctccggatctccccttcccttcccgccgtacaccaaagttatctcgccctctgcggatctcagccctcagccactccgccgcaacccctcctcctctccgatgtcgcacgacaactcgcagggcggcccgcccgtcctcgctccggtcatcatcacgacgaccgctcccgagggcaaccagcagtgtacgtcgcctcttcttcctccctctggcgcccgtcggccttagctcccatccgatctcctcccgtcccttgctcggtggtggcgcacccctccactggccaacgttctccatcatcgcaccctccttccatctttccatctcgcacgtctgcgctctctctttcgcttgagaaagagggcgggcgactgcatcgccaccgcttctgcttgcctgcgtaccccgatcgcagggggtcgcgggcccgcgcggtctcgccaaagcctcctgccctttgcacagcctcattctgggagcccctcgctgacccccttctctcctccttctcctctcgcagcggcccgcgcgcccacgacgccgccctcggcctccaacggcctcggcctgatcgcctcgccctcgcagcagggccactcgcccgcgccgacctacaacacgctcccgtcgtcgaacccgccttcgccgacgcagcagcagaccccgtcgtaccacggcgccggccggtccgacgccaagcagtcgccctgggtcaaccaggtcgccggcggcacgatcaacgccgacgaccacctcgtccgcaaggactcgtccggccagtcgtcgtccgacctcaacgacaacgagaaggagtttgaggagaagaccgacaaggatgccaaggaggtcgagaagaccgaggaggccttccagcaggacatcgcccttgaggaggctgccgaccttgacatgggcgcttttaccgtcaagcccaagaagctcgcgtcgctcgtcgaccccaagacgctcgagacgctcacctcgtttggcggcatcgacggcctcctccgcggcctcggcaccgaccccaagaagggcctcgactcggatgtcctcgccaagtcgggcggcggcaacgtctctgacccgaccctcgcctcggccgacgctcgcaagaagacgtacggctccaacgtcctcccaatccgcccgcccaagtcgcttttctacctgatgtacctcgccatgaaggacaaggtcctcgtgcgtcgccctcctcctttctctcgtctcgatctcaacgacctgctgctgactcctccttcttctcttcttcacagatcatcctctgtgtcgccgccgccatctcgctcgccctcggtatttaccagaccatcggcggcgagccccactacgtttactccgagtcccagggccagtacgtcgaggttgcctcggtcgagtgggtcgagggtgtcgccattatggtcgctgtcgccatcgtcgtcctcgtcggctcagttaacgactggcagaaggagaagcagttccagaagctcaacgcccagaaggacgaccggcgcatgaaggttatccggtccggcaacgagcaatcgatctcggtttacgacgtcctcgtcggcgacattgctatcctcgagcctggagagattgtccccgtcgacggcgtcttcatccgcggtcaccaggttaagtgcgacgagtcgggcgccaccggcgagtcggacgcgatcaagaaggtctcttacgatgagtgcgtggccgagcggcgcgcccaccgcggcccggcgcccgagaagggcttcaagctcgactgcttcctcgtctctggcggcaaggtcctggagggtgtcggcgagtacgtcgtcatcgccgtcggccccaactcgttcaacggccggaccatgatggccctccgcggcgacgccccgccaacgccgctccagctcaagctcaacgccctcgccgagctcatcgccaagctcggttcgctcgccggtctcatcctgttctcctcgctcatgattcgcttcttcgtccagctcggcacgggtgtccccgcccggacggcttcggagaagggcgccgcctttgttgacattctcatcatcgccgtcactgttgtacgtcgccttgctcctacgttattctcactcttgccgattctgacccacccctttttcctgcagattgtcgtcgccgtccctgagggtcttcctctcgccgtcacgctcgccctcgccttcgccaccaagcgcatgaccaaggagaacctcctcgtccgtgttcttggcgcgtgcgagacgatggcaaacgcgaccgtcgtctgcaccgacaagaccggtaccctcactcagaacgtcatgtcggtcgtcgccggctcgcttggtgtcaacggcaagtttgtccagcggatcgcagagtttggcaaccggaccaacgccgacgccgcccgcggcgacttctcgattgagatgaaggagctcaacaacgtcatgtcgcccaccttctcggccctcctcaacgacgccatcgtcctaaactcgaccgccttcgaggacatcagccaggagacgggcgagcccgagttcgtcggctccaagaccgagactgccctcctccgcttctgcaaggagctcggctggaagaactacaaggagacgcgcgaggccgccaaggtcgtccagatggtccccttctcgtctgagcgcaaggcctcggccgtcgtcatccagctccccaacggcaagcaccgtgccttcttcaagggcgcgtccgagatcctcaccaagctctgcaccaagcacgtccacgccgaggaccgcatcgcctccgaggagatccgcgaggtcgccttcacccaggagtccaaggccaacatcgacaagaccatcatcctgtacgccaacaacatgctccggaccatcgccgtctgctaccgcgactttgagtcgtggccgccggccgagacggaccaggagggcaacgccaagtacgagtccatcgcccaggacctcaccctgctcgccgtcaccgccatcgaggacccgctccgccctggtgtcaccgaggcagtcaccacctgcaaccgtgctggcgtccaggtcaagatggttaccggcgacaatgtccttactgccaaatcgatcgccatccagtgcggcatcttccagcccggcggcctcatcatcgagggccccgtcttccgcgagctctcgctcgccgaccggcgcgagattgtcccccggctccaggtcatggcccggtcctcgcccgaggacaagcggatcctcgtcgccaccctccaggagctcggcgagattgtcggcgtcaccggtgacggcaccaacgacgcccctgcgctcaagaaggccgacgtcggcttctcgatgggcatcgccggtaccgaggtcgccaaggaggcttccgacatcatcctgatggacgacaacttcggctcgatcgtttcggccgtcatgtggggccgctgtgtcaacgactcggtccgcaagttcctccagttccagctctctgtcaacgttaccgccgtcttcatcaccttcagtgcgtccttctctctgctttttctctttttgcttccgacgctgacctcttgcattcctcctccttcccagtctctgccgtctcgtccgccgaggagcagtcggtcctcacagctgttcagcttctctgggtcaacctcatcatggacaccttcgccgcccttgccctcgccaccgacccggccacgcccgactcgctcgaccgcaagcccgaccgcaagcgcgccccgctcgtcacggtcgacatgctcaagatgatcctcatgcaggccctcttccagatcatctcgtgcctcgtcctccacttctgcggcaaggccatcctcggcatggagtgcggcaccgacgagcttctctgcgagacccagcaggaggagctctcgaccctcgtcttcaacacgttcgtcttctgccagatcttcaaccagttcaactgccgtcgtctcgaccggggcctcaacatctttaagaacttgtgcgtcctcctctcatctctcccgccatcttccagtcgctgacctcctccttctctcttccttctcagcttcatcaacaagttcttcttcatcatcttcgccatcatgctcggcggccaggtcctcatcgtctttgtcggcggcaccgccttccaggtcgtccgcatcggcggccgtgattgggccatctcgattctcgtcgccatgctttcgctccccgttggtatcatcgcccggctcctgcctaccgagccctttgcgcgcttcctctacaagatccacatctaccaggaccccgccaagctcccaaccgagactgtcgaggccgaggacgcccagtggaacgaggccatcgcccggacgcacgacaatttggccacctacgccaagatccgcggcggccggctccagggctcgcgcctcgtcctcaagtcgcgcaaggctcagctcaagaagaagaacatccagccgacctcgctccttgcgatgctcccgacgatcgttgcctcctcggtcggcgccggctggcggcccgagtccaagggctcggccctcaccgacggcacgaccggcggcgacatcaccctcctcgccaagggcatctcggttcacccggacacgcccaaggatgacccgtactatattcggttcggcccgaagctttgaacagctttgaacgaccccttcctcctttccacatcttttgctcgcctctccctgctcctagtcattaaaaccaccacatcactgtaccaactcgacacatcccccgccctcccatgggcgtctctttcctctttccctcctcatttccggcctgtctgcgcttaatgatccttaaatcaattcaagcgctctccatcagcttctcgcttccgccctgcttcaactattctgctctcgtccctcgacttgcgcctttctcctgaagcgctcgagcgtggcgtctctcccagcagcgccacgtctccgggcgaggggcattcaatgagggacgagcttcgaaaacagaagggaagggggcacgcagggcttagacaggcggcccgagctcggccgagcgggacgacaggtatgagccggcaaggctgaggtataagtcggctggcaggcgtcagtcacgcggcaggccactccggcgactcaggcgactcgaccacggaagccacttaggcgactcaagaggctctcgaaccgctcgagtcgcagtcttcaagacccgattagttggttggagacgtctttattttacagcgtgatgaaagcgttgttcagcagcgaagatgagaaagcgggcaaggagagcagtgaggtcgtaggagtcgtgagggatgtacaagatcgaggatcgtgtgcgaagcaatgactgtgaagagagccgagataaaatccgttctgagagagcgccagacgagcgctaggctagacgggcgtgatattgttagcagcccaggccttgacctgcggcgataagcggaggtgttggtaagtcagcgaggcaacaactaggctgacttcattgaggaatgacgcaggacgcacccgctcgtgcgtgaggaccttctccggcttgaagccgatgacctggagcgacttgaggctggtcgcgcgcgacagggcgacgtaagcttggccgcgggcgaaagcgcgtgacaggtcgaccttgacgcgttcgagagctagtgaggcgagcgccgagcgggtcagccctttcagtcgacggccctctgagtcagacggctgacgcactcaggccttgcgacttatggatcgtcacagcccaggcaactggaggttgggacgaggtcagtctcgatccgaagagcccagagtcgcgcagaggaaggacgtacggacgaggggcacctgacaccgaccggccaaggtctcgcccttggagttctcgacgctgaactcgacaggcttcacgacgaactctcgaggggtgccgttggcatacttgaagacgacgcgcgggtacttgtcggcaaagtccttgacgatgccgacgctgccattgaagaagccctcgtcgtggttgttcttgaccagcatgacctgcgcgccgaccttgagctcgagcacctcttgcgccggaaagcgctggatcatgtgggcacggctctcacctcggagattgccccctggaagggcaaaaaagcaagctgtcgtgtcagcgaaatcgggctggcgagggaataggtcggcctcgttctggcaacggcacgcacaatcgtctgccctgaagcgcacgatctctgcctcgatcgcgttcatctgccgccagttgctggcgttgacgtcggcgaggcgaggaaagagctcctgataggcgtgagagtgtggcgacggatcagcatgccgcatctgagcaaagtgcgtgaccggtgaaaagaggccgtacggttggttcaatgctgtcgttgtactcaacgggcagcgccaggctgtgtagcttgcgcgtcgtctcagcgctgaccgtgccgagccgaacctcgttgagcagcgcgacgaaggctggctcagcctgacggaagctgagggacggaaagtgagaaagccaaaggcggcatgtcagcagagcgcggaccggtcggaaagcgtttgcagatggacgcacacggtcgtcaaggagagcatgcgcttgatgcccaggcgccaagacgaagcctggaaggcgtacgctgggtcgtcattgccctggacgacgggagggagctgcataaagtcgcccgtgacgaccatctggcgaggcgatcgaaaacgccgtcagcataacagcaactgctatagcagggttgctgaaccgacctggatgccgccgaacggcgcttcgttccctcgcacggcggaagcgatggacgagagcttgtcaaagagcaccgcgtcgatcatgctgacctcgtcgatgacccacacgcgcgccctgcaatacttctctatcttcatgggcgacaagagaatttcctttagcagcttgcccacaggcttgttgccttggccgatggaggctatcggggaagaggcgggcgtcagtcttgctcgctccgagctcagacgcccggcacacgcaccgaacgcgtgcacggtcgtgccgctaatattgtaggccgcgatgcccgtcgacgccgtcactgcgaccgcgtcgagtccgcgaaacttcttgaccaacgactggatgatctgccgcaaaaggaacgtcttgcccgtgcctgcgggacgcgcaccggagtcagtgtcgggtccgctgcttgcttgacctggaagggaggacggaccggctgagccggtgaagaagagcgagacgccgtcttcgatgacaaggtcgtgcaaccgaagctgctccggtgagagcagtatatgcgggtctggggcgggcaataattcatctgagtcggacaagccgtccagctcgtcgctgcgattcgatgcgcaaaggggcggtcagtgcgccgtcggcgacagtatggcaagctggagcgtccggcgaagcgcacctggtgactggcacgatgtcagaggattcgttccagacaatcggacggacgcccggagatgagggggccgactcgggcgacggagggacaaagtcgggtgaccgagacgcagcgggctgcgatgccgccggccgccgtcgctcggcagccagagcctttggagaggccggccgttcgcttgatgacgtcgccggactgaagcgaggcggactgctgccggtgatgtagcagaggccgacgggcgaagccggcagcacgacgtcggaagccgagggcgaaggacgagcgctcttcggcggcggcgaggcaggcgctatgaagtcgtccgggtcggttagcttgcgggacggctgcttgtcagttagcgtcgtccaaccagcaccaaaggtccgatcaagctggccctgcggcttcgccggccgctgtcgggcggcatgggcgtcgtctcgggccttgagtctcttgctcggcgagcccgcgggcttgacctcccgaccgggctggactgtcggcagctcgcgcttcttggccgccggtttggtcgaacgcttgatgacgatgggaaggtcgaccgattgtgacgagctcggaagctcgatcgggtcagccttggtgccggcctgatcgatcgagagggcgagctggccggcgggccaagatgggaaggacgacgtgccggcggaggtcgccgtcgagggggttgcgagactcgctcggagcgccgtcggcaggcgaggcatggggctggagacggagagcttgcggtccatggtcgtcgttggagggtccggcgctacttgcgccagacgagcggcctttgacggcagcccgagagtaaagacggacggtcggagggacaaagtgagcagcgagctcgagtcgcgacgtcgcgtcgtccgctgcggcggcgcgtcacgcgtcgccggcaagatcagttgcgctctggccttcgcgttgcctcaaatcgagaagagctcatgcggataccaggcagtcttaggatgagaagctgtcatctcatgcaggagcgaggcgacaagagtcggcagcaaggccggcgacggcgacggcgacgctgaggaggttcatctgctgctgcgcatcaaagcctcgatttgggcgatcgacgacttgcgaaccaggagaaagatctcttgcaagacgaagcaggcaggcaggcaggtgatgaccatgcgcatctgaagaagggggcactcaattgagagtcctccgggagtcaactgccgcgggcgaggtttcgtcaagagaacaggttgcaggagagaagatcgtctagtcgtgatttagtcgtcaaggagtagccagctgggcggcggaggggtgtcgtgtcgagggtatgtgtgagctttgccaagcgtgcgaccgcctacatcttcggcttggccttgatcttgagagtctcgagcgagcgcttgttccattcggcaacctgtcgaagcgagcgttcgtcagactcgagcctggctgcagtcaggcggaagcgagagagactgacgcgagggtggctcatgaccttttcggaccggaagttgaggatctggagcgtctcgaggctcgtcgcacgcgacagggcgacgtacgcctggcccttttcaaagatcttgccgaggtcgcagcgcatgcgctggagggctgggggaggcaggccgcgagacggcgagtcagttcgcagattggtcgggctgagggtgatcgagagacgtactctggccttgcgacttgtggatgctcatcgcccaggagactgcatgatagtgggacgcagaggtcagcaagccaagtcgagtgcgcgcagactcggatgggagacgtacggatcagcggcacttgtcgccggcacgctgcgacttggccgtcgggcgtttcgaccttgaactcctcgcgctcgatcaggatctcgcggaagttgccgccggggatgctgaatttgacgagcgggaagcgctcgccgccttccgtcactttgttgaagccgtcgccgtcatcgtcaccgatccagccctcctcgtcgaggtcgtcgagcgcctgcctgcggctgacgccgtagccggcgagctcggccggagggacgccggcgagcgagccatagacggcgtcgatgtacgtccgccggtcggtaaaggcgacgacggtcccgatcgagccgttgacgagatcggtcgtcttgttcttgatgagcatgactgaagagtcaaaggcagcgtcagcgtggcagcatcagcagaagtgatgggggcgaggcgcaccctgagcgccgacctgagcgagagacggagcacggtccggttgagtcagctttcgaccgagccctgcactctccgagcggacgagcgcaccttgagcgacagtagctgaggagccatcatgttgttgaggaccttctcgcgcgcctcgatcccgagcatgcccgctgcgacgcaaagcaagtagcagtgtcaggatggcccgttgaccgccgaggagaggaagcacgcgacggacagtcgtaggcaggaaaggttaagtcctccgtagtgagcgctcgtagacggacgaggttggccgtttcgacctgcgcgcgatgcgagaagagctcctgcgagagcaaaggtgcagccgagggtcaggcgtcaagcggaagagcgcaaatctccggccaggggcaggcgcaccgtcggctccagtccatcaggatactggaccggccggctcatgttggaaaaggtctcgatcgtccgctggctaagctggccaaagcgcatctcgtttagcatgtcgacgaagcgctggtccttctgtcggaagctgcgagagtgggagaaagggggtcaagcgctcagcctgcggacgattcgatgagcctacaagatgacgtacacctcggtcaggttgatgcagcgcatgatcgtgctgtaccacgctttgccctcgaacgcgaacacaggttccgagccttgcgtcacgggcggcagctgcaggcgatgcgagtggtcagcgcgaagcgacgtctgcgtcgatcaggaaatgagctgacctgcaagaagtcgccgcagacgaccatctgacgagagcgatacaatgcgaaagtttagccgcaagtcgcgaacgatgagcaagcgcacggacgcacctggatcccgccgaaaggtcgcttgtcgccccggaggatcgagccgagcgccgccagcttgtcaaacagccgtccatctagcatcgagagctcgtcgatgatccagaccttggcgtcgcgccagcgccggaggacttccttccgaccgcggatcttaccggcgagccggtggacgtcctcgagcccgaggccgatgccggcgaaggagtggacggtcgagccgccgatgctgacggcggcgatgccggtcgaggccgtcacgcagacggcgccgggatcggggtatttgtcgcggagtgacttgatgagctcgcgcaagaggaccgacttgccggttcctgcgcgtgcagagccagcaggtcagcctcagcgcagacgctaaaaaaagaccgactaggacggacctgccgagccggtgaagaagagcgagacgccatcgcggacgatgaggttctggaccgtctcctgctcggcgctgaggacgacgaccggaccctcgggcacggccagtttgggcttgctctcttttggttccggaatggccagccagacgcgcgatccggtcgcctttgcgacgcgagaagggaccgcttgctgcgtccgagccttgacctcgctgtaacagtcggtccgcacgtcagctgtgaggtctttgtgcgaggcactggctacaagcgatgaacgcaccgactcggcttgacgtcggcatccttctcctcctcggacgaatccgtgtcgaagccgcttcgggcccgtttcgcgctcgcccgcctgcgctgagcgatgagcttctccttgcgctggtcggcactgggcgtctcctcaaccaccgccgcctctgtagaggtgccggtgctcggcgcgggcgcagcagcagagcgtgtcgccggcgcgtcgtcgtcggacgagtcgagttcaatcgcgtctccctcggtatcgccgccggtcagccagctctggctccggccgacgggcgtgatctttgggacgaccgggacgacaggcttgacgtccgaggtcgaagtcgagccttcctctgcgggcacgacctcgagcttggccttcttctcggccggaagcaggtagaggccggcgttgaacagcgagcgctgcgacggcgacagcctgacgaccttgtcgtcgatagccttctgctcggcgttctcggcggcctcttctggtgtcggcggcggcggcggcagcggaagaggcacaggcgctgaagcggccgccgccgtgctcggacctgcgccggcggtcttcgccgcgttggcttcggcggcgaacttggccatcgcagcctggacggcaagtcgccgcttgagctgcgccggcgtcagctcgaccaccgtcttctgcgaacaggcgctgggctgagacgaggacgccatggcgcgcgacgcgagaaggagaggggtcgaccggtcgaccgcgagttcgaagggcgggtgagcgaagctagcgccgcgagacggaaaactaatcagcttttactctcggttctgacccttctgaacgtgccatagcaagagcgcacctgtacaggcgctcggccagcgagctcagaagtacgagatggtaggagcaagaggacggagggccagacgggcagacggccaaggtggcccgagctcgacgcgacctgcgggggacggccagaattaagaaaggggtcatttcgcccgcgcgaggtgcgacgcgactcgactcgacctcgacctcgagtcctttcatccagctgccttccttcttttcaccttcgagctcaagcaagccaggacaggcagacgatgcgacggtcgctcacacccccgccccagctcgtccgccggacgtccgtctcatgccaggcggcactcccggctggcccgtccgtgacctctcggtcggtcgacccgcgctcgacgacgtcctccctgttgccaccgagtcctcctcggacgactgcctcgtctttgaggccgaccacgtcctcagccgccatcagctcgggctggagctgcacaagctcgcatcaagctctgctcgcctcgatctcgagctcgagcagtcacggctctgcggcttggctctcgcctagccctcgctatcagccgcagctgcgccggcccttcgcctcatcctcgccaccggcaccggcccagccgcccaagttctacatcccgagctcgtcgtcaggcgtcaaggcggcatcaaagacgcctctgccgtcgaagcagcagccggcgtcgggcgatttattcttcaaccccgccgcgtcctcgtcgtcgaagcaggccctcccggccgacgtcttgcgacaggcgggactcaaggtgccctcaaagccgagttctcccgtccctccttctcatcgtcatagcaccgcccaggcaggcggctcctcggcttcctccttcacgtcgtccaagctagatgtcaagaagccgccatcagatccaaagatcctgcggcctaatccggcggcggtcccggccctggccttgacctccgcaccggccaaatggtcctgggccgcctttccggacccgatgcttccaatcctgacgggcggctcaggcggctcagcatcaatgccgtatgagactcccgtcttccggccggccctcacgccctacatgccggcgccgctcgcaccaggcatgccggctgagtcttctccgggcgcagaagccaccggttgggaccggaccgccgccacaaagcggaacggcctcggcgcgccgaagctcgagtttctcgcaccgacattcttcacgcccggtgtcgagcagctcagtcaggagcagaaggcggtgcatgacctcgtcgtcaaggacggcgtctcgatcttctacacgggctcagccggtgcgtccagcggtcccagtcgtgctgcttgctaggccagggagctgaccttagctctcttcccgatccaccccagggactggaaagtcgatcttgctcaagcagatgatcaagtcgctccgcgagaagtggccgccgagcgagtacgagggcgcgatcgccgtgacggcttcgaccggtatcgccggctacaacattggcggcaacacgctgcactcttttggtccgttcgaacgttgccatcgtcaatcgttgcgcggctgtcctgacgacttggctctcctgacgacgcagccggtatcggcctcggtgacaaggacgtcgatgagcatgccaaggagatcgtcaagatgccgcgcgcagccaacaattggaagagggcgaaggtcctcatcatcgacgaaggtccgcgcccgtcgtgcagtcaatgtccgagccgccacccgatagctgattgctctcgttctctctgccgcagtgagcatgatcgacggcaagttgctcgacaagcttgccatcatcggctcgcacgtccgcgaggacccccggccgtttggcggcctccagctcgtcctctgcggcgacttcctccagctgccgccggtcacacggaacgacgccgatccggtcttcgcgttcgagtcgcaggtctggccttttgtcattcagcgcatgatcagtctgacgaccgtgtgagtgcccccgtcagttgtgctgcttttcgagtcggccagcttctgacatccttggatcctcatcgcagcttccggcagaaggacccgagctttgtcaacatgctcaacgagatgcgctttggtgcggtctcggcagaaacggaggagcgattccgcggcctaagtaccgccatcgagtatccggacggcgtgacgccgacggtgcgtgctcacgtgtggtcttgctctgttgcgcaactcctgacgccctacatccaccttgcgctcgtcaggagctcttcccgctccggtcgcaggtcgctctgagtaattccgcccggatggccctgatcaaggccgagtccaagttctaccgagcggaagatagtgcgtcattcttgtcgaagcgccgacgctcgttttcggacaacgctgactgttctgccctcctgcagccggcttcatgatggagcagcgcttcccggtcggcctgcgcgagcacctgctcaagaacctgatggcccctcccgaactcgagctcaagccgggcgcccaggtgatgctaatcgtcaaccagccggccttcagcctctacaacggctcggtcggcatcgtccgcgagtttatcgacggcttcccccgtgtcgtctttacgacgatgacaggcgccgtcgttgacgtcgttgtccggccgcagaagtttagcgtcgagggcgccggcggaaaggtcgtcggccagcggcagcaggtgccgctcattctcgcctgggcgctcagtatccacaagtcgcagggccagagtgcgttctcggtcgagcggccacatctcacgcccgtttgctgactctcttcttctcgcaccggttcagccctcgaccgcgtcaaggtcgacctcgacaaggttttcgctcgtgggcagtcgtacgttgccctctcacgtgttacctcgctcgagggcctccaggttctcggcttcagcgcagacaaggtcatgtgccatcctcgcgtaagtccctctttgacctctcttgtctactggcgttgcagaaaattgacgggattgatcgtccaatcgtggcgcgcaggtcgccgagtggaacgcgacgcggctcgagacgctcgccctccccccgcccgagctggacccagctgcatcgccgacgacggccggcctcgtcgctgcggccggcgagggcggggcctacagcgacatcgcaccgatgtttacgcctcgggcttgaggggaggcctttgattgcgccctttgggcatccattcacagctcagcctttgcgccgtccttcgtttgctttgcgactcttccactttcaccaggaccgccgttgtcgacttctctagtcttcactgcctcatttcgatcacctcctatcccgcaccctttcgcttcttcgtaactctcctctgctttcccacttgccttattccttcacaccgacgccatcgtcttgcgtcttcacccctatcgtttgtgctactagacactgctttccgttctcgccgccgccgcagagtgacagaggccatccttgagtattcagcctagcgacttgcgccggagcacgcgactctgctagcctgtcctgcgcccgatcagtcatcctcgacagagacgcaaaaaagccatagctctccatccctcccctctctcgccaacccgctccctcctcccgtcctcgaacttcaagcgcttcgcgcgcgctcttagttcttgatcgtctcgcccgcggcgtagttgatgagggcctcgaggtcgaacttggggtcctcggggtccgagatcgggcctttgggattgtgggagggatgggagtcagctggtttgtagagggaggggtcggaggcggagagcgggagaagcaggtggcgggtggaaggagaggagggcggggtgggtgaagcgggcgtgactggcgagccaaagtgaaaggatcaaagcgattcgagcctccgtccccgcaggctcggacgatcgtccggtgcagccaacacagttagagcgtccccagccctcgacgacgcgaggttcctcgtcacgcgcgccgcttcgcctttcaagccagcccgccgatgggtccgggttatacggcgaacccggactcgcttagccgcgtctgaggcccaggagcgagcacagaaggggcttgctcgcacgcccgcgagaccccgctggtcctcctccagcgaaggacagcgctaatgccttaagcgggcgttccagcccattggccagcggcctcaagctctagactggacagcgacaaggctggccagatccagatcgacgcagatcgggttcgagcgagcaccaccgctgttgctcgtcgcaaaccggcgggccgacggagggcttgcgcggacgcatcgcccgcatgccaagtcgacgcagtccactgccagcccgatccacaggcggcctgacgatcggctggcagctcgactgcaagcctccccggctcgggaagccgggtgacggaggaagaggagaaagggtcggggtcgaacccggccgtggcctggctcgtgcggagccgccgagcgagtcgcgcgcccgccggccccgatcgaggacggattgtcgctcgccacgtcttacgagggcagggcgggcgcgctacatccccgacgcacgtcgacccccggccagctccagaagcgaggaataagcggaggcgagctcgagagttcaaagaaaggaggagggagggggaagcgtctaaacgcacccttggtcgtcgggctgttcttcttgtccttggccgccttgaaggcctccttggcctggtgcagcaggtcgtccttgtggtgctcgtgcgcggcgagcacacgctcgtcgtatgcggcctggacggtccgggcgtggaagaggccgtagaagaggccggtgacgagggcggtgtgccggaggacctgctcgggtgggaaggtagaggagggagggtcgcggtccgtcggtgagaggatgcgggtcggttgtagtccgtgcaagagagcaggttgagcgacggccggggtcgatggccggtaggagggtcgacgacggaggcgcagattgcgaggccgagcgagagcaggacggagagaagcagagagcggcagacggggcccggtcagcccctcccggcgtcacacatcaaggcggtgtgtctgccggcctcttcgaaggacgtacgttggtggtctgcgaggccattttgaacaaactaaaaagaaggagaaggagaaggactagagtgaagacggaggagggtgctgagcgacgagcagccgacgagaggtcggctcggtcggcccagcgcgggcggccgacgcgcgcggagtctgaacggccgccggccagagggtcgagtcgggtcctcaaagctcaggcagggacgtccttttcgctgcagacacgaccagccactggcaaatctctctcagacgaccgcatgctgctcatgctccccttcctgtcgtggcatgggaggcaggaagtggcggcctcgggcgtcgtcgatgcatttcctgctgggttcgattcatctctgcaggctcgccgccgcgcctcgcgcacgcaccatctcgtcgtcgtccctccgcccaggcccctcccgcttacattccccaccagccacgatgtctgccgaagagctctcgttcgtccgtgccacgctcgaccggctcaccagccagccagtcacctacgacgacgcctttacgacgccggcggctgatcggccgaggaagccgaggctcgtcgaggtgagttgcccttgcgctcgtcccgtcccgtctcgcccggcatgctcagacccgtctgcatggcatgcgctcgtcaactgagcgctccctccggacgggacgaggcttttcaaaaagttcgctttctgacagtatccgacaggagctgactctggcctctcctgccctcgcgcccgccggcagatcgaagtcgccgacccgccgaccgagctgtctctgtcgtccagcgctcagcccggggcagcctcgtcctcctccagtcagtccggaaggaccttcatcatcttcggtccagcaggctgacactacgtcgcttctcgccctccagccatcaccctctcgattaagtgcctcaagccggccctcacgctcgccctccccggctgctcgcccctcgaccccatctcggccgtaaagggcgccctccaccaggcccggccagacgtcatcccgccggcgagccaccagcggctgctcgtcaagggcaaggcgctcgcggacggcgtcctcctcagggagtatgcgctcggcgaggggagccaggtcgttctgatgctgaagccggggtacgtcagaccggcatccggccaggacggcagcccagcggcggcggcagttggcggcggtacgagcgcgagcgaccggggcatcccgaccgagccggccccgtcggacccgacgtcgccctctgccgtcccgaccctcaccctctcggacccctcctcgccctcgatgtcatccgccctccctccctcggccttcacctcgccgacggccctccctccgactgaagctcactaccacagcatcattgccgacccggccttctggacggcgctcgacgcctttctcaaggcccgctttggcgaggtcgccgatgccgagcgcttctttgagctcgcgctgctcggccagaagcgttacttgaaggagggcgaggtcgcaaagatcagggacgagacgggcatcaccgccatgggcggcggactgccctgaggcggcacgtcggcagagccgtcttcgacctcggacggtgcgcggtcgtacgggttcgacctgggaggctcgagggatcggctcggcctgccggtgcgtgtgttcgaaacaggatcgccccatttggccagatcgcggtcgagatctggccctgggccctcaggagcggctcatcttcgacgaaacgcagagatgcgatcggttgacagcctctcctctcggcacgcaatgttccccgggatgcttgtcagccagagcagggcccgagtcgcggcattggccaggtcgtccttcgcggctggcccgcaagcttccctgcaggctcatccagcagcccctccttccaccccttcccgctccgcgctgctctcacgaattgcatcttcatgatctccttcgacccgcttcaacctccccttcgctttgggctgattccggacccagttctccttgcctagttcctcgccgacgatcgcaaaaagtccatcttttcctcgtcagccttcaaacacctctgccctgaatccacgctcgaccgcctcccagtcgacctccccttcgccctcccgtctctccgacaccccaccgtaagcgtggtcgaacgtgcggcctgagacgcgtgtgaggaagggcacgagctgagcgatggagcgggggctggaggaggaaagggtgacgaggagcgggcgtcggccgtgggttggtggatggtcgacgtccggcaggctgacgttggagtggccgccgacggcgcttgaggaaggcgagttggtgaggacaacctgtgcgagccggtcgaggagcgccatcggtcggctgccgttgtcctcgaccgtgggcgtcgtagaaggtggcggacctgggaccgagtcgtgcacgaacatccactggtggctgctcgtccgggacagagggcgatgtcagcaggcgagcccaagtcagagtgagggaaggggggatgcacatctggaagtcctcgagctggaggacgagcagaaggtcgaggaagcgaagggcagcgacgaggaggacgaggtgctcggaatcgtcggccgggggcgtctcgagcgcctgctcgaagacgcggagctgcggatgagcggcagacgtgacgcgtcagtcgaggccaaagggagggcgaaggagtcggaagacgcacgagctcagtcaggatgaccggccacaggttgccgagcacgctcggccccatccggcagacgagcactcgcaagcagaggtagagctcgcccgcaacgtcggcggccaagcccggcgctcgcagcgcctcgacgagcgcctgctggatcgtcggcaggtggaggacgaaatggtttgtcggcccggcgaggaggaccgtcgtcagacgccggacgtgaagcgcgtggaggcggatctcggcgtcgcgcgaggtgaagagaccggcggagggcggggcagagatgcgcgctgcggtgggcgggcggctttcacggtcagcaaagagccacccggagagcaattgaaacaggggaccgacagatgagttccaccagccggtccttctcggcgtcgacgagcgcgagcacaagtggctcccaagcggccgcctgggcaggggcaagcgcaaaaaagcggacgtcggcaaagggctcgccgacgagctgccgccagcccttgatcatccctgggacggcggcgatctgccgaagtagcttgagcggaagcggatcgctacagatggggctaccgacgtagtgtagggcaggttcggtcagtatctcgctgagcaagtcatgaatgagccagacgccggacgcactttgcttttgaccggagcgcggggacgaccatctgggtattgacgactgagcaggcggcgagcacgcggtcggtgtcgacgagaaagcgccggaagtttggtacgacgcattcagtcgagaaggcagcgatctagcagggtaggatgcgagctttagtcatcagcctggattgccagcgtccagcacctctgtaagacgtacgttgacgaaggtcggcagcgagaccgactcctttgggcccgaaacgacagcgcccgccagcgctggggcgctaccgctgacagcgtgttcgtaccgccggccagccatggtcgcgacagcctcaacgagccgcgagtacgtcgtctgtagctcactccgaaggcgacgatcttgtaacgcgctcgtggcggccactttgtcagcgaggaccgtaatcaatctgcgagagcgacagcttcatgtcagtagatgcagtgctgctttgcggagcttgagggagcgcaccggagggtggggtaggcaaagctccggcccgctgggtcgacggccgcaaagctgatgtccttggcaaacgagaacagcgtagaccagacttggacggcctgggagggttcaaggcgcgtgatgtaggcctcgagaaagtcgaagaggttgacatcgcgactaaggggacaactcgaagtcgatcagcgagtgaagttgtgtgaaacagttgcgaacggacggaccggccaagaagagggcctaaacgaggagagcccttgtcgctagtcgccggcgctcgagatgagagcattcggcagagacctgcgacggcgccctgcgagctggcggcgagggtgtcgagtagttcaagtgacgcctgatgggatgattcagacagttagcaacggccgtcgacgtacaatggccatgccctgaactcacagaagacgaccccccgtgactggcccagatctcggccaaggtctggacgacgccgaccggctcgagtcggtacagctgacctagaacgttcgctgaatgtgctcgagtcgttcggcagagcgcaccaaggccgtcggcgatgatgcgtccctctttgaccgcgccagcgtcggctgcctgccacagagcgtgcagagcccggacggccttgatcagtgaccggacgccggaagtgatgttctggtcgagtatggaagtgtcagctttgctaagctggccccgataagagagcaatgtactcacggccccgccaccgtttgatgagccctcctcgctctggccgtcgccgacaaagacgcccacgacgtggcctcgcaggccagcagatgagtctgaccggcttctcgaaccctgctccttagcatcggcggacgcgcggtaggccagcgatgcgaccagctcgagaatttcgagataggctgtcacctcgaggtcagacggaaggccggtcgacatcgaagtcgccgtgtccgtcaagtcgagtctaagtcgcaggctgtcgctgatccgagcgacgcgaccaactaggcagtccgagagagggctgagaagggcccgtgtcgggccgcggaagagcggcacggtccgcgttatgaaggccgaccactcgggcaggacaggcaggttggacgaagtcgacaggccgtcgacgagagtctggaggaggacgctcgtcgcctggtcggacggcacgagcgactcgtccgatttcccatagtcttgcgatgagctcgatttgcgcgtggccgaggcttgaggggagagcgaggcgagtcggatgacctcgtgcaaggtcagcagaagctggccctggatgtcgaggttggcactgtggatgcacgagaagatcctgctgacgaggccgacttcgacgaagcgcagaagtgatggtgtgaggccgctgccctgagcgattatggcgtggaggagcaaagcggcgtcgagttggagagcagcaacactgtctcggaagtcggccgaggctgtcgaaggagcgtcggttgacacgaacctttaggcagagtttgcgtcagtactgccgattgaggcaaaatcaaggaaagctgcactcacagaatcaacacctcgactaggacgtcgagaaaggaccgatcgtgcagggtgagcccggctgcgaggtaccagtcgtcggtcagctttaggtcaggttctggacacacagcgacgccaaacgcactgcttagagtctgctgctttagctgctcgctcgcctcctggaaaggtgtcgaccggagtgacgttatgcaggagacgctgtcggctgcctgcagccggagcaggcattcgaacacgtagctcgcgcgtcgagtgtcgaacaagcccttgtactcgatgctgttgaagcgtcgaccgttgtgcgcggacggccacttcgcacgagcggtgctgagatcgaggaggatgctgagaagcggatcgaggaaccttcgcggacgcaaaggcggcaggtcagcatcgctcgaaaagtgcgtgcgggccggatgaaaacgcactgcacgtgcgacgcaagattgactcgcagccaggcttcgccaagtcgacgtaccgagacggtccgggaacagagagcgtcaagcacggcgaaaatcgaggcctctgccaggtcggcgtcaaagtcggcgaagtctgcgacgatcgcaggctgagggtcagtcgacctgctcactgtcgagcagtgtcctgacaaacggacctgagagtcgccaaaggacgccgagcgccgacagcgcgcgaagcttcgtcgatacattcgtcgactggaggtcgacagatagcgtctcgcgtagaccagctcgcccggtcagccggtccaggtcccagaccatatgcacagctccgagatggttgaccgtctcgtcgcctacgagaacggccaagctctgcacgggatcgcttggatgatcagctgcgctgtcgagacgacctgaacaaggggccttgactcactgctctcaaaaaggtcgtcacctgtggacggcctgcaaaattgagcggcggccgcaggctgtcgtttgaggccagctcgagcaccgtggcgacgatctgctgtaggatggggaatgaggcggtctgcgatggggattcaagcagacgtcaggtagctggtggatcgggtcgagccagggtgaggggcccacgtacagtctgagcaacctgggccatcgtcgccagccaagcttccggctgccaccgcaacgagatgggatgcgtttggtctgcctcgggcttggtgagcaggtgctcgatgaggccgaggatggcgacgagctcgctgcctctcgcatccgcgtcggcagcggcgatgtcgcttgcagcaagcaggctgtcgagagagatgcggaatagcgtcgggccgctaaagcccgggtagtccggctcggctgctagctgagcgtcgggtcgaccgacgtagacggcgagggcgtgtggtagcgggtcgtctgacgcgttatcgttttgcggaagcttgggcggccggtcggacacaaagaccgaggcaggaaggaggtgaaggatgtcgccaagagcggcgagcagctgtggcccaatcttgaaatcgggtaagggcagcgaggtctgcgagactgaagccgtcagcgacccatgaacagtcaggacactggcaggtcgacgcacctggagcaggctgatgagagacgcaaagaggagaggcaggtggaagtgcaggacctcctcatccttcggcggaaacgtcctcaggacaaattcgaggagcgccaagttctgtcgcttgacgggcaaagcgagcgccgactgttcagcagactaaagaggagcatcttcagctgcaggcgtgacgtacctcgtccgtccagtccgcggtgtcgctcttgatcgcgataaagagctgctgccagatgacgaacggatcgagcgcgtcgaagagcgtacgtgctgccagcgaggtctatgatggatgaggagctttggttcagtacttcgtcgcgacgtcaggcagaaagtcagcaatgacttgccgtcagcgcgttcgcaaagccacggcgctgaaagactctcagcgtgtcgagcacgagtacctccgacagtgggagcccaatctcccacttgtcgagaagcgaggtgaagatcttgagcgactgaagcgcctccccttcgtcggcgtcgaggccagctgcgagcgacacgcgcaggagctcgagcccgtgctcacgcaggaaggcgacctggttatcggaggactcgccagagccggcgagccagatgtacagacgccgactgagcgagagatctcgccgaagaacgacgcctgacgccgcccgcatcaggagcaacctgtcgtcatgcgccgccagggtcggcgaggccgcgccgtccaggcggaggcttgtcaccagcaggtccagaatcccgcgttggacgaggacgacgctgtcctcgagacagctggcgaatgctcgaatcatgagaccgatgtcggccccgacgatgtgcgtgatgtcgtcgtcgggcccgagctttggcaggcgccgcgcgaggtaagtcaaagccgtcggccgggccgaaggcgacgagatcagaacgagccagatgttttggaacagatctgagggggagatggtcgaggagagatagtcgaggatcgacatgacctgcggcaatccggtcagccgcgccaccctgagtcaagacgcgccggatgagcgcccaccttgtcaaagtactcgcccgtctcctcttcgagtccgggtagaagagcgagaatgagagccttgatcactggtcggagtccgtcctccagcgggaggtagaagcgttcgtagagctcgatcagttgcggctgcataggcgggtgtgtcggcgtcgcgagcgcaggcaaagtcagccttgacttctgcatgcttgtgacgatgagatgctcggcaccttggccgccgtcgacgcatactggaagaatggaaagagaccagacgaccaaatgagcaggtctctccggaggccatcgggctgaccacacggacgcaagcacgagtcagcggcgcgcagcacgaggaccgccccgagcccttagtaggcaggcaggcggaagctcgcaatgggagacgcacgccgatgaccttgaggatgtggccatagacgtcgagcgctcgctggtgaacgccgctcggcaggctcggcgtcagacactgggcgagccgcttggcgacgagcagcttgcgcgggatctcgctgaacgctggctgggcctgcagcgtccggagcaggcgggcaaggaaggcgatgaagtcggcccactccttaacagcgtcaaacgaagcgagggtcttgtcgacgagggccgtgtacttccgccagcgagggtcactctcgagatcggcgactagatgaggaaggggaggtcggggcgtcagccctcgtgccgggtagcagctcgagctctgacgtgctgaccagtctcgcctcccggccgcgacgatgacggcgtgttgcgcccactactgagagcagaatcgagcgggcccctgcctgtatttggcagtacgaggcggctcgcgagcttcgggctgccggaggaggacggagcgctagtcatgccaagcggaggcggccgagctggccgctgagctgagggttgtagtggccgcgctcaagtggactgtcacgggcagtttacacgcgagagagcgcgctcgggcgttgattctgctggtccgaagacaaaagcgaagtggctgctgacttggcggtcggttggaggaagatgatgctgcgggcgagcgaggtcgtgcaagggtcgcgggctgaggtgttgcaaccgagcaccgcctgctgcgaatcaaaaggaaagatccaggcggatcgcaccggatgctggaaggtaggacaggataaggcaaggcgtcgaggatgagatgacttcaggtagacgaatgcggtcggaggcaggtgggcgtcgcttgcgctgaggcggcccggctccgacgcggcgcaagcgtcctgcagtacgtgcgcgagcgagaggtgcaccactcgagatggagcgttcgttgtcgagagatcaagtctgcgggtgtgctgaagcatttctagagaaggcgatgacaaggactgagggatcaagagggtaaaggagcgggtgggtagcaaaggacggtggggggatttggaagccgggccggatttcgccagcggcgaagaatgcggagatgtaagcgaggggtctttgagagatgagaacgatgatgagtatgatgaggaggtggatgagctttgagaatgaggagagagatctctaaggggggagcagatgcagcagtcaaaaatgagaagagttcggagcggccagggatagcaaagtcgtcgccgaagacgtctttcgtctggcatgcgagttcgagggcggtcgagcgattcgggggccgccgaaagagagaggacgagccgattcgatgaggtcgaagcagagatgagagcgagatgagagggggaggatgagcagcagaagaccctctcgacccggctgcattgttgttgtaggcgatttcgtcggagttgccggccgtcgaggcctacttgtggcccttgctggtcgacgagggacgagcacagctcttgccgtcggcgccaacgacgaagccctccttgcagcgctggacgacgcacgagcccctgtcacacgagacgtcgcgcgtgttgggtatcgccgagcaatcttgtctgcgagggcgagggccgaggagcagcatcgttgatcagcttcagagctacagacagaagaagcgagacgagagaagagcagcttggagactaacccctgtccgagcgagaggcagcctccgcacgagtcaagctcctcgtccgtcgggatgcactcgaaccctccggcgagccaggtcgcaatctgctggaggtcggcctcggttgccgtcgagcgatccgagccaggtgctggaacagggcaggcggtcgccccgtcggggcagaggaaggacgaaaagtccttgcggctgacgggcctgacctgcttttgctcctgagtcgtgcctttggaggaagctccgcggctcatgcccattcgacgcgagggctgaggaccggaggcacgcttggcggtggaagccttcttgacaggatgggaggaagctgcggcgacgaccgagaggacggcgagcagcagcagcagcagcagggtgaaggttgggcgggccatgttcgacaggaggaatggatcgggtcgatggctagggtgcctaggtgttctggaccggcaaattggccggtagagctggttagagggttgggatgtcgacggaggtttgcgggtcgtcgttgctggtcgtggaagcagagggaagcttagaggaagggccgagcttcggagggacgacaggagaggctggcctgctgcgcgccagagacaggaggccaagctcgccaaagccgcaggtcgtcatggcccttcgtactgacctcctcgagccatcatccttcacgggaagcatccggatccagttcggcgtggtcactaggaacagcatcatcaacgcgcttccaggagcggtttcaacttcgtcaaaagcaggtcggccggtcgatcttgcatcctcgcttctcgtcgcgtgcgcgcctcctctcgccatcacctccgccatgtcgtcgcctcggtcgtcgcagatgggctcgtcctcgggcggcgccttctccaactttctcccccgcttcaggcgggatagtacggcctcgccccagcagcagcaagcgacggccggctctatagtcggcggcggcctcccgctctcgccgccgaggttcgccgtcggccccgagcccggcccggcggccaacaggtcaagcgagggtcgtcgcctgtcggtctcgcgaggccgctcgagggatctgtcaccgtcgccaacgacgtcgagctcgcagactatttcccccaggacgtctctgacgaacctctcggcgcacgcccgacagcaaggtatggccccatcgagcagcagcagcagcagcagcggcggcgcgaccgacggcgccgcggtcaagagcaccgtctctccgccaaagctcacgctcacgaccacgggcgacggcgagagcggccgccctgctcaggccatcatcataccatcgccgagcgacttgcatcacccgtcgagccccttcacgcaaggccgcgaggacgaggctcggacgccgacagctgagtacggcggcaggctgggcgagcgcgacctgcgcgtcggctccggcagcctcaacctcgacgatgtgccgtccggcatcgcccatcacagccagcagcagtaccagcactactcggacgaccgttcttcgacctcgcgtccaacttcgccgcgcaaagactcgagcacgtcgttttcgtcgacaaccaaaggcgccggcgaggcgtcgcatcgcacgtcgctctactcgtcgtgggacggcgcgtccgagtcggcctcgcttgccgcgccctcggccggccgctcgctgtcacccgaaccgaacgacgcctcgcccaatggcaaaaaggctcgtcgcaagcgagggctgtctgcctcgtcctttacgcgccgcgcgaagccaactgccgggatcgcgggcgccatcgctggcatatcgaaggatcttatcaacccagcgaccggcctctcgctcgtccgctcgcgaaccggcgacgacgggagccagacgctcggtggccgaccgcgaggcaacactggcgagtcggtccgctcgtcaggctcggccaagaaggcggccaggaaggataagcgtcagtcgacggcgtcgagtcgcgatggcgaggtctacgagaacggcatctcgcgcacgcgggcttcgagcatctcctacatcagcagcaacggcgacgactcgccgacgtcttatgccgacgacgctgacggccgggcctcacccgcgctctcgcaccgggcgctcgtcgccgcgctcggcgactccgacgcgaggtccgactatggcgacaaccggagtgcctacagcggcggtggcgacgagggcgacggtcgcagtctgctcgacgacagcgaggacgacctcgacggcctgccagacgacggcgatgactatgacctggacgacctgcccgtcactggcttcgccgtcgcgagtgtcaagcgcaatgctgactttcacgcgctcttcgagaatgccgttcccgaggacgactacttgattgaaggtaggtgccgtcggtcgctcggtcgctgctttgacccgggcgctgacgcaggcgccgctggaacttgccccttggcagactacggctgcgcactccagcgcgagatccttctccaaggcaggctttacgtctcggagaaccacatctgtttccacgccaatatctttggctgggtcacgaatgttagtgagggggctgatcggcaccaggtcgtagcgcgatggcaccgagctgacgagcagctccgatcccacagctcgtcctgccattctccgatatggtccggatcgacaagaagatgaccgccctgatcatcccgaacgcaatccagatctcgacccttcacgccaaggtgcgcttctgctggttgcgctgcttctggcgtcgcacccctgacgctcggtcacctggcgcctgcagcacacgtttgcctctttcctctcgcgcgacacgacctacgacgtgattcacaacatttggcgcctgtcgcacccccatctgccgtcgggcaagggcgcaccgtccgaggaggccggcagccgccgccagtcgaacgccggcgaggcctcggccgacgagattgggcgatcgacctcgcctgacgcaggcggtggagcaaagggctcagcggccactcgccggcagccgacgacctgcgcgtgcctccgcaagggcgagcactaccccgaggtcgcgatggacgccgtcttcccgagctcgccggagaaaatctacaacttgatcttcacgagcggcttctcgaaggactttatggtcaacgaccagaagctgatgggtgcgtcgcaggtcatcgggctgaagacgttactagactgaccagagctggcaacgacttctccttcctcagacctccaggtgtccgactggaagccccaggacgcgccgtcgtccagcatgcttgttcgttcgatgtcgtacatcaagccgctggccggcggcttcggtcccaagcagactaaatgcgagctgaaggacgagacggaccacgtcaactttgacgactacgtctcaatgctgacgacgacgcggacgcccgacgtcccgagcgggagcgccttttcggtcaagacgcggacgtgcctcatgtgggccggcgccaacagcacgcgcgttctcgtgacaaccaaggtcgagtggactggccggagcttcatcagaggtgcgggcagacccggcgacttgagcgtaggcctccctcagcgctgacctcgtcgcttctaatcctcaggcatcatcgagagctcggccctcgccggtcagaaggagttccacggcgcactcgagcaggccatgcgggcctacattgccgcccacctgaccgagtttcacctcgagggcgtcgaagacgacgcggacgacgtcggccaggcgaatgcaacggtcgcgccgggctcgccggcacctggcagcggcagcgtgacctcggccagcgagcatgatgccgagcaggccaagaagaaggccgagcaggaagggctcatctttcagtacggcatcgataacatcggcaagggcgcgatcgagatgctcaagggcggctgggcgattgtcgagtcggcatgcggcatgctttcacttcacggcgcgctcgcgctcgtcatcaccgtccttgtcctatcgaacctgtggactctcctctcgctccggggcagccagacgacagccgttcgacctggacggacgaccggccgctcgcctcgctcaccaccaccggttcctcgccgggtcggctcgcgtgagtcgccagactcggtcgccgacgccgtcaagtgtgcgtccaccgctcgtttcttgtgcgcctggcgtttcgctgacattctttctctcacctcgcagcattcctcgaggagtacatgcagcaaatcgacgagccaccggaccggtcggcgcccatggacgaggttagggccctctcggcgacgctcgacgcgctcgaggcccggatcggccgccttcgcgcccagcttcccgttccaacaacgtctgccgtcctgcctccagctcaggcccgtcaggatctgccgggtctgaatgggctcgattagagactcctgaatctcatgcctctgcgcttgtcgtctgcggcccgtcgcccggctgcccagcatttcgggggccttccccaagttggggagtttgatccccgacggcaggttggcaaactggcctcttcatcactagccattcctcctcccaccaccttcgctccctctacagtcaatctctacatcgcccgccatgtctgacaccaacgccgacggtacgcttcgctccttccatcgatatcgtcgccatcttcgcctctggccgcagcgcaaagcgcgggttgggcggtagactcgcttctgcctcggtcgcgagcccgcccgcctccccctcgcatctcctcctgcgccattcggccccactctcctcgacctcgctcgcatccacaaccaaccgcctcctgtgcgacctgtgctgcgacgacgtgccagagtcgacacggtcggagggacccggcttcgccgtcgaaccaagccatctgcttcctggtcgaccgcgctttacccgctccgcccttagccacaccctccctcctcgccgcctcccggctcgcctgcctaccatccagctcgcctgagcgtctcgtcgtcgcccatctcgccgtgctcagcctctcgatcatttcgccgcgccgactcgcccgtccttggtgtccgatcagcccgcctaacgaccctgccgctcgcccgccttcgcctgctcagcctggaacgcccgcccctccgacgcgccttcggacgcccctgcgcctgccgacggcgagcagcagcagcagcgcgaagcctcgcctgccgctcgcgacaaccgcgaggagcgccgccggtcggcctcgcctggcggccgcggtcgcgccgacgagcagccgcgtggcgacaaccgcgagcagcgtgatcagcgcgactaccgcgacagcggccggccccagtgcgtctctcacttgatccttgcaacaatccaccgttggcgctgaccaatttttgtgtgctcatagggagcgctttgacgccggccaggccaaccccggcaacaacctccacgtctcgagcctggccttccgggtcgacgagcgcgagctcgaggccgttttcggcaagtacggtgtcgtacgtcgcgtctttcaaccctttcacgcaccagttccctgctgaccatcgtcgttactcgcccgctacgatagattgacaaggtccagatcatgttcgacccgcacacgcgcgagtcgcgcggcttcggcttcgtcacgatgaagacctcggaggaggccgacgccgcgattgacggcctcaacaacaccgagctcggcggcaagacgatgcgtgtcgagaaggtgcgcttcgtccgctcttcaagatctggacaacagctgacgagcgccctctcttcttcaggcccgccgcggacgtgcccgcacgccgacccccggccgctacttcggacctccccgcgacgacttcccgccctcgcgcggcccgcctccgcgcgtctacgcgccctacggccgtgacgaccgtgcctacggacgcgacgaccgcggcccgtcctacggcggcgaccgctcgtacggagaccggccttacgcgcctgcgccgtacgaccggcggtacgaggaacgccggcctgagccgagccggtacgacgacaaccggtacgaatcgagccgctacggcgaccggccgcctccccgggacgaccgcgcgccgccctcgcgctatgaccggcccgcttacgacgaccgccggccgcgctactaagcgtgccgttgagatccgcttttctctcagtcccattcatgtttcccttccagcgcggtaggtgctcgtgcgatatgatggtggacttcttgcaccctcaatctcttcgtccgtggctgtcagcggtctcacgcctcacgcaggggtggtgttcgctggcccgcggtggtcctgaagctcagcctgctcctcgcaacgcattacctgactctcaactcgctgctcgtctgttgtgcgaggcatacacgccgtccccgcgaagtgtagttgcgtcggtcgacgttccgtcccgctttccgcggcgccgacgacgaacctcggcctccacctgctgccgactctttcctcccgaccgccgaccaccaccgccttgctctccctcaatctctgctccgatctttcgtcatctatcatgttctcccgcctcaacgcctcggcacctcgcgcgctgctcaggcgatcgttcgctgctctgccgccgccaccgccgcctccggccgctcgctcccggcaagggctcgctctcgctacgctctcggccggcatcctcctcggcggctacgtcttcaaggccgaccggtcgaccgtctcgctcctatcggcgccgctgatgctcgagtcgcccgtctgtgagtcctagagcgacgagcgggccgtgcgcccgagctcaggctggccggacctcagcctgctgacgaatcgagctccgtccgttcgtcccctgctggcagcgacgcccaagtcgacagaggcccctatcccctctcagccgccttcgacgacggccaagacgaccgaccagtcgtcgcagatcggcaagggacccgtcgtcgagggccgtgagagcgccgagcggactggcggctcggagttcagcgacgtcgacgtcgcgggcgattcggtcggcggcaccaagcccgaccaggacggtgaggcggcggaggccggcgagggctcggctgagggagggagcagcaagggcacgggtgaccctgcgacgcagggtgctttcaacgaggagacgggagagatcaactgggactgcccggtgcgtctttcctccctcccgccagtgacgcggactgcaggatcgaccgaatcactgcgctgaccgagcctcacacttgtgcacgcagtgtctcggcggcatgccccatggcccgtgcggcccccagttccgggcggccttctcgtgcttcgtctactctgaggaggagccgaagggcatcgagtgcgtcgagaagttcaaggacatgcaggagtgcttccgcgcccacccggacgtctacggcgagtgtgagtagcagagagtctgcgcgagattactatctgcaaagcgtagagctgaccctgtttctcgcctcgcagccgactacgaggacgacgaggccgagccggcgtcgctcgaggccgagcagtctgcactcgagccgctcgagtctcagctcatggacgacccgtccaagccgttcgagggtaccagcgatgagcgcggcgagctctttgcgcaggacggcggcgtcacgggcgagggcatcggctcgaagaccgagtagggaagggcgctgcggcgcgcggaaaagggggaggagctcgagccgtcggccctcgcactcccaccgccacatcacacacacttctatctagatgaagatgctcgtctgtttctcgcctggcaccgctcgccatgtctcggtcccactttgcgtctcgattcagcaggttgcgaaggcgcgtgcggcaaggctgcgccaccctccggccaacgcgtgcggcggctcgatcttcttcccctcgacctcgaccatcggcctctcgcgtgacacccaccttctctcatcctccctttagacgtgcccggatagacagccatgtcgaacggatcgacctcaacgccctacgccgtcggcgtcctcggtgagtcagacgtctggcgggcagcctcttcgacgtggcgcttgcttgagctcgcggcgttgcccgtcgccggaccctcgcctgacgatgcgtacgcacgctgaccgccagtcgaccggccgcgtcctgcagccctccagggtgcctttgaggagcacataaacatgcttgcacggcttcggctgcccgtcgagctcggcgggtcgaggctcaacgttttcgccgtcagaacgaaggaggacctcgaggcgtgctgtgagcaagctccgccgatggccgtggaggctgcctttgaacgccttgctgatccttctggctgtctggtttctgcctgtcttgcgcttcagctgccctcgttatccctggtggtgggtgtcacgcttgtcctgcaaagtcgcgtcccttggtgctcacctctgatgtgcttccgcccgtgcggggtcgctgcgcttccgtctcctcctcttaggcgagtcgaccgcgatggccaagattgccgagcgctccggccttctcgacgacctcgtcgccttctgccaggacccagaccggcccgtgctcggcacgtgcgccggcatgatcatgctttctagccgagccgagggcgcacggaagggcggccaggcgctgtttggcggcatggcgacgaccgtcatgcgcaatggcttcggcagccaggtcagtcgcactggcgctcatcatttatccagcaggcgctgactctctgcttatctgactccagcttgagtcgtttgagagcgagctcgtcgtcaactcgaacaagattcggtcgcccgaggtacctttctggggcgtcttcatccgcgcaccggtgcgtctctgcagacacgcaacgccagccctggatccgaaggtcgctgaccatgctgcgcactatgcgttcagatggtcctctcgacggagaccggcgaggaggctgcagctccgaccgacgcgcccaaggttgagacggccctcccggcgacggctacggcttcggcaccgagcgtaccgccagcagccgacaccgagatcctcctgacgctgccgttctcgccatcagacgcgccgtcgtgcacgccgtcttcgcacattgtcgctcttcgccagggccgtaaagtcgcctgctcgttccacccggagctttcgcagaaccacatggcgagctcgggcggcctcggaggggccggtgaggtcggcgtctttggcgagagcgccgaggaaattggcgacgctcgcatccacgagtattgggtccacaactgctgcctccagaagccggcagacgtctgatggtcatggtcgtcataaaggaatcgtttagggttcgtcgccggggcgcacagccggcggcggggtcgtcaggtcttgcgagagaagcgagagagtactaggctaggtcctcaaagtctgcgaaatgggcgagctcggtcttgacaaagacgctcgcgatgaacgaaagtcggcggatggcttcgctccggggttcggccgcctcgtggcacatgtggaggaacgggaggctgcaaagggacagcccacgtcagctcgagactcgcctagctccgaggtgcagggcacagagacgcacccctcatccgagagcgtccgcatcagccgatcgagcgagttgccggtcgtcgttgccgcagagaaagggtagagagtcgcggccagctggagattgcggtcgagtgtcgactgggagaggatctgctcgatttgaggcagaaggaggtcgcgactacaagtaggcagctctagtcagcctcgggatgcgccggcaaagggggaaaaagaacggaacgcaccaagtcgccagggaggccggggcgctaccggcggcccttgccaggagcgtcagtgacaactgtcgctcagcctccgatttggcagcgtccaagcacgggccggcgatgaaagcgaggcaggcgacggtcaaggggctctcctaccgacaagcaagaccaagaagcgtcagcatctgggctgaccagctgcggctaagggtagagtggctgctgaccggcagcggtgcttgctcgacgtcggccagagaacggccggcctccgcaaagagcgtcttgcagcgcgccagaccgccaacgccgacgccgagtgcggcgaagtagcacatctgctcagcgggctgcagactcgggtcctggagcaggagcgagagaatgctgaagagcccctcgcgaactgcagtcgcagattcggacgagctggaagaaaaccgggtcagcgagaatccacccggagcctcccggcgcggatttgagactcactggagccctttgaagagctgtagggaagccgcagagcgctcgcagtcagcgaccgaaggtacaagctttgcacgagtagcgcgggcttaccagcgagagcacgccaagcgcaaaggactcgtcctcgccaaatcggacgccccaatcgtcctcgagcgcgtcgctgaggaatgcacaaagcggacggtcaaggaaggcgcagaggtcgcctggcgaagggcggccaagggcggcgagggtggtcgcgacgagtcttgcgccggctgagaggaaagctgatccgagcttggcgacgccgagtccgatccagaagaggcagatcttcgactcggtctcgaggtgggtggcgagagcgttgaggaggccaaggaggccgacaagcatgtgcggccggcgagttagctcgagctcccgtgccagttgctccaggatctgttgcgacgcaggcgtcggtcagcgcggtttaacgagtcgtatcgggtgctggctttggatggactgacgccgcggaggaagtcgggttccggcggccgggggccgaggaggacggccagcgtgctcaagccaacgatggcagagcgcgcatggctagatgcagcgtctcccgaagcgaggccgacccagcgctggatccagacgttgtattggtctgaaggcaccgcgttcatgggtcagactcaggtccagatgaggagttcgcagcggacgcaccgtcattcggagcgacgatgcgcagcagcaacttgagctcggagcagactccggccatcagcccaagttgagccgagggcgacgagtctgcacggtcagacgtctgctgtcgtgccgccgttacacgctgggcaataaggccaagagtgtcatgaacttgatcgaggttcgtcgtctcggccagcgagagtaaggcgttggcaagaatggccagagcggttttctcgtcctcgacgtcgccgccaaaagctcgcctgatggagggagtcagtggatgtttcgagcaggacgagtccagtcgctcacccacatgatggtcgagagcagctccggaagcgagatgacgaggtgagagggattgcgacggctgagaagccggaaacaagggcggatgtcagccaagtcaccggcctgtttccgcggcgggaccgcgatctcaccagtagctgagcttgaggagcagccgcagagcgttcgtgctcggcgcatcgggcgctgcagaagacgtcagagttgcggcgaaggcgttctgatcaatcgaggagagaagaggagaggagagtcgtcgtcagggctgagtctgaccttctcgctggctcgataccgggcgtacgcttcgagtgatcgacagtgtcggtgcgagcgccagcccttttgaaaggaccatgatgacctacgaggatgaaaggacgggccgtgtatcagggattggcaggcgtcagagcgaggtcatcaggagtgagcttacctccccgatcgaggcaatctcctcttgcacgccggttctcgccctgagcaggagctctttgagcgcgaggtcgacaagtacaggatcgagagcgctggcggcctcccaaaagcgcaggacggcccgtatcgctcgctgattagccagcacgaccacttgcgtagcgtcgaccagctcgcaggcgacgatctgcagcgccaatgtgtcggccgcgtctcctgaagatgaaagcgacgccgcgacgcggaggaacggctccaagagcgcgaaaagcgagtggagatcgttgcccgggctggacacaagcgtgaggcagagctcctgaattacgacagtagcgaggtgagcgttgcagcgagccacctgctcaactagaatgccgaccctgaaggagcggaagaagatcagctctgcgacagccaaggtcgaagaaaaagcagcttactcttcctcgacagacgcaggcagatgaaagcctaactcgatgagagccacgggaggtgctggcggttagtggacggcgcgtgagcgaaagggaaaattcagcggcgtacctttgagagcggtcaggtcggggcaggtgactttgcccgtgccgacgagcgcaacgagcaggcgataggctgcagcacgcaccgcatcgtcctgaactgtcaagccgacgagcccctggacgatgagccgagcgcatgtctggtccggtgaagcagtcgcagaggagcgccctcggacgagtatggaaaagcgctggaaggccggacgagcacgaaagtcagcttgcaggtcagatcgaagggacaaggccagcccagctgaccgtctcgagctccttcatgtctgcgaggaacagagccagcgaggggtcagcgcaagcttttcactgccaaggttcgcatgtgaaacttgccagtagagacgagatcgagggtgaggccgtttttgaagacaagccggatggcggctggccggccggtatagcgaagtagtccgacagattcgagatcggccaggccgaatacatccttgaccgcgacctgctgatgcccgtgttggccgtgaagactctcgtgtttgaggtggcgcagcgtgacggacgaccgggtgagcgtgaggaggacgggtcgacgctgaccttgagcatcgacgacctcggcgtcgacgtctgggtagaggggctcgtcctcggccagaagagctgcaaccacagggacaaatggtcagcaaacggcgaatggacgggagggcagcgagcggacaaacatgggagcatgatctcgtcctcggggacctcgaggtggtgcgcgagggcggcgctgccgctacacgcgactacagcgtcgagcaggccctggtctgaagaggtcaataccagcagtctcgtcagccgtcaaaggactctggatccgaaacaagagcggttggcgaacggtcgaagatggccagcagggaccggacccggcggaaggccttgatcgtcagcgagtttggggcccaaaggacgatcttccggcagagctgagccagctcgtccgggacgatttgaagagcggcgaagagccaggccgtgaggttctcctgagatgctgaagacgttgctggaagggtgctgcagtcgagcacaaggctgaatggaccgagcgcgtcgttgacagtctgccaagagggtgatgcgtcacttcaggactctgactgtgaagcagaagcgaggactgacgagaagaccggtatagagaaacgtgtcgaggtccaaagcaaggactccggtgaagtcgaccgcgtagatgttcttgccctgacgagaaatgccggcgcatcgtcagcagttgctcatgtgcgctgagctggtcgggcttgactgtgcgcacctggacggagatgtcgaggaaagactcgaacggatgcggaggctgagtgctgcagcggctcgtaaagtcgatcgacgtgcgggcccgggtcttgctggagagatgctcaggccggaagggccggccgagagtcatcgtcgaccagctggaggccgtcgagaggatcaccatgacctgttctttgacagcggcgctgcccggcgcgttttcaaacgactcgaggttgctcgagaggtagagacgtaggagaagctcgtctgcgctgtcgtcggaagcggaagttgggcttgaggcaaggatcggagagccggtctgacggaagaagcggacgtcagtgttgaaaggtcaaggcagggatgagcaagccggacgacgcacctggaggccatcaagatagctggccatcttgcggatgttctgctgcgaaagaaagttggcgaactcgtctggcgcgaccgccttgccgagcgaagcgtcgttggcgaggtgtacgaggagcttcgacacctcgacgagcgcgcggcggccggtaccactgaggctcggatgggcgatgtggatcgaggtcgggctgatcatcgcaggcgagatcatgcgaagaatgatgaaggacgagattgcgcggcgccgtaggccgggaaacctctgctcgaaagcttctccgaggacgcgacatgcctcgcggaggatcctgagtgaaagcagactctaaaagtcagcgacgcatcgaagtaaccagtgatcggccagtgatcggcagagcaacgactcacggcggagcgtccgcaacgctgtcgcagatgcggtcgaagcacgtctgagcgaggagctcgagtgactggatgctaggcgactcgctcgatgacgaggaccgggactcgctctcgaatcgagacgggtgtccctcgcagacggcgaggacgaaaggctcgaggatcgcacggaagtagttgctgaggggaaggggggggggggggggaagaatgctgtcagattggctgctgcatcgctgaagccagggccgaggcttacagggcatgtcgcttggccagaaggacaaacaccttggtcgtcagggtggcgcttcgaaaaatatcggcctcgccacctgcgagagaggttacagaggttaagacgcgcactcaaggctaagtaactaagtacgcacctgtcgtggctacttcgacctcgcacagtgtctgagggggagcgcaacgtcgatgagcaggagaccgcgtctgctcggccgctgagagaatctgccgactgacctcgagcatcgaggagagctttccttgcgcctcggattgccgcagcagaagctcggcaagggcgtcgttgtccgtggaggagccagagatgtggtgaaggaccgaaggcgatagctgcatctgccgaggccgtcacggtcgcacagtcagccaaatgacctttgctctaatcaatacacgatctgcgtcgcacccctttgtcgccattgagcagtcgtagaagagccggcttgagtttcggcatggccggctggctggccttgccgggccaagagccgtgcgagacagcggttgcaagagccgcgagggcgactgctcggtgcccggcctgatcaccttgggccgcgacaagcagtggcttcagcgcgacgtcgccgttggtccgcagaagcgtcgacactgtcaaacgcgcgcagattggtgagctagagcaggcgggactccgcgatctggctcagttttacgtacgacagtcgacgacgaggttgaagagttgaggctggatcgaggtctccttcgacacgagagccaaagacgtggcaaccctttgggaccgagggaagagggcgttcgtcagagccagcaagttgtagtgacgacctccgacacgcaccaggtctcggcgatttgccgtccggaccggccagctcgctgctcgtcgacaaggctaccgacaccgattgccgtagctgccgctgcgaggcaagcgaaatcgagtgcggcgtacgcggccgggctgaccaggctgtcgtaaccctatgcacgagttccgaaagacggtcaattttcaactgagagtagagattgccgacgcggactcaccttgagcgtcgtggacgtccagtgtgagagggtgtcgatcgcccaggtggccagcgagcactgctcagtgaggtcgagaccgaggccaaaccgcgcgtcgacgcaggcctcgaccatccgacagacctgcgcgagcgtccggatgtactgcaccgcagccgcggctgtcgtcggtggtgcggtgtaggcggatcggtcagccgagatcgtcgacaggcagtcgaccatgtcgaaacagagctgcaagacgggtgcgtgagtcgttggattggcgagatggagagggcggagcgtcgtgagaagctgcgtaagagcggtcgccgagcagaagatgaagtcgatcgacccttcccgcttgatcagaactcgatcgcggtcgaagaggttgccagagaggctgtcacaggatggctcggtccttcgttagcatcaaggtcaacgagattaacaacaagatcgtcgacacgacgcacgtgcagagcgattgcaccacgccgggcgcgagtgacgggctcagccggccgatggcatcgcagacgccactgcggatgtgtgggtccgggtgcaaaaggaaggaggtcgtcgcgtcgaggactggaccaaagtgagctcaagtcagcagcagcgatgccgtaggcgagagtgagggtcgagatctggcgacgcacattcctcagccagatcgtccgaggaaccgcccggcaggcgaaaagcttctccggcaaggacgcgtccgaggtaggagccaatgacggaagacgtgtgcctgttgaaccagcgcggtgtgggtcagcctagcgtctgacgccggcagatcacagttgcaaacggaagccttacagccagtcgtcgacctcgggggcgtcgaacggcatgatgtcgatgtcctgtcctgccgagcgccagcgctggaagatttcctccaggacgagctcggtcgagcgcgaacccggcgcatgctctcgcgcgtgcaggtgagcacgcattgacccggagtctgcgcgcagaggggttatgtcagggctcgcggcagctgaatggagacagacaaagactgacccttctgccgctcgcctgcacgccagaggtcggcaaggcgctgcagctcctggccaaggggcgcactgcgctcctcggatgacatggccgagacaatcttgtcgatgcgcccggaccgctgacggagggcagagagaccggcggcaacgagcaggggatccttcgcaagagcggcaatcacgctggacgcctcgtgcatgtcgagtccatcggcgacgacactgggcgagggcaaataccaggggaacttggccgagtatcgacaagcgagctcgagcatgtcgatgacgaaattgagggacgtggtcggtgacgagtccgctgacagagtaggtcggaagaccggtagaccggcataccagagcggcgtccaactgcgagtggagggttatcagcgagcgctggcccaataaattggggcccaatcgggccgacgaggtggaactcacgctgcgttgccaaaagctcgccaaacgtcctcgccaccgcgatcggcctcaagggcagcgactgcggaaaatgccgtcgtcaagcaggtggccgccgacgacttgaggtggctggatacaggtgctgcaaggatgctggcgagtgcactcaagatgcctcccaacccagcatcggacgtcggagtcggcttctctttgccagcgatgaggaagcggacgtcgcgcttaaagaactcgagcacaagctggagcagctcgaggtcgatcgcagagagcgccgcgaccttgtcgcctggaaggagcgcgttgggcgtcgcaggatcctgcaggcgccatgaaggaagcgtcagctcggtgaaaacgagtctcgcagacagcatgcgcactggctggagaccgaggacaaagtcgcgcaggaccgcgccgacgtcggcaaagagaggatcgccgtcaaagaagacgccggggagctccttttgaagcatgaggagcgccttggtcatggtaaacttttgccagtcgaccatgttgctgcggaggtcgggcaggctgctcaggagcacgtcgcgcgggttccgtcggatgagcgagtacaggccgaaggagagtatgccaaggtcctgatcgtgaagaaaggcgagcgagtcagccctgcagatggcgagcttcgcgggtaaggaatggtgctcactcggtggtcgtcctcaccgtagagcagctgctcctggagctcaacgacaaagtctgagacgagcaatttaaggctgaagtcgtcgcccgacggcagcaaggtcgaaaagtagacaaggtcgatgcagcagcgcttggcgacgccggcaaagttgggcaggtagaacgagctcaggaggctgtcgaaccaagccacctgttaagacattgctcgagcgagcgtcagcctccaatcctcaccacatctaagggaatgaggtgcgcacctttttgccagcagagcccttcatttgacccttgccatcgctctcccggtcgacgactcgacggcagagtcctggactgagcgcgacccagagcgtcatggctggccagaagctgaacgcccagcgcggcgccatgacgcccaggtcccgacagctgttccaggccatgtcaaacaggctgttgaggtcggcctggagacccgtgccctggtgcatggcgacaaagtcgtccggggcgtagccgacgaacgaccagatgttcgagtagacggcctcggcaagggcggcttgggcgactcgggggatgtggagaaagaccgacgacagctcctgggtgacctgggtgagccgggcgcggtcgatgaagcaggcaccgagcgtccgaaatccggcgaggtcggcggccgacggggtgcttgcgatgctgctctcggaggccaattgctgcaggcgggcgcgcagcgtcgatagaaacacgtcccagcgcacgtacgagatggcgtagatgatggccgaggccgcctcggtgagggctgagtgtacgtcggcatagatcgccgaggtgccttgagatttgcgcccccggcttgctgcgccggccgaggtgaacgacgcgtcggcgtggcgcgaacccctcagagaggcgctctcaccgaagctgagcgacgagaggcttggcgagagcgttgtcgagcgcgatgccgagtgctcgtgacgtcccagccgatgggggaggccctgggcagggtcaatggagctgcggaaggacgacgaatcgtctgaacggtgggtctcggacgcagcgagagggctgcgaccgagctggctggcggcgagcgccagcagttggtcggcgacccggccgtcgagctcgagcggcggaggcgacgaggagtcctctgcagccgccggtggagcaggtaggatgtactggacgagctcgaggaggaacagcagggcctgatgggccgccgagaacgacaggtcgtcttgggcgaggagcggcagctcacggctcgtctgcgaggcctggccgagcaggggtcgcaggacgtcgtcgggactggcctcagcgagcttcttgatcgcatcaagcgttcggccaaagctcgaattcttgcgaaggagggcgagcggacggtactgcgaatccggaagctggatgggacaatgggaaggctcgagcgtcagtctgcggctcgctccgagctcagtccagagcgacgcaccttgtcatacagcgtctggagcatgagagcgactgatcctccgtcctcgacgcttcttgacttcaggtgcgaggcgaacggggccgagctgctgctgatcgaagggccggcccgtcgcatgtcgcttgacgcacgggccgagccaggacggacgacagacggcgcggccatctcgacgggtaaggcgggtcagcgaccggagcgcgagtgcttactcgaccgggggtaggcctaagctggcaaaagtcgccaagggccgagggcttgcaggggcagaagcggttgaggaagggaagggtgtcgagagtcgctcctggcaagctcgagctcggctcggccttgttctcgctcgcccggcgcaaccgcgatgaaaccctcggccccctttcttcgccggggaccctgaccgccgcctcgatcctcggtgcatcagtagacagtcatgagatcatagccgaggtcggcgaggggagctggggagggggtgtacaagaaggcggcatgcaaggatgaagtgagagaagcgtcgggccggccgagggggctcagcgccggcccttgctctttgtcgcggccgaattcttctttgaggaccggcggtcgtcctccgaatcgctgccacctccgccagcagccttagcctcgcgcttcttcttgtcgctcttgtcggccctccgctcaagctcgtcccacgactcgccctcgctctcgtccgaaacggcactgccgctgtcgtccgaggcgtcgctgtcaaagtcagactcgtcgtcggtcgactcttcgcttgagacggcgtcgtcgttcgagccggcgtcaaactcggaccccgactcggattcgtcggagccagaggcctggggtcaaaaaacgacgtcagcgagcggtcgaccagcctgaagggcgagacgacgcacctcgtcgccgccgccgagaaagttccagccgccctcggcaaaaaactggtacgggtcctcctattaacgggcccggccgagccaaatcagagggtcagccgaggtttgcgaggcagatccggagcatgctcgacgcacattgaccgtcttgaggatctgcgaccaggtgaggttgacggcgccctccgaaattggaatgtcgcacgagtcgagccactctttgatgccctcgagctggccaaaggggatcgagttgacatgctgcggggtgcgcgtgaagtcgctgaagacaaagaccatgtcgaatctaaagcgggagagtaggcgacgtcagcgttccggaagtcgggcggccaggaaaagtcggcggacgcactgcttgaggccgtgctgcacgcgctcgaagtggacaatctcgacctcggacagcgtgatgacgagcgtcggcatctcggttagctggacgagggcgtcggtcgtcggctggaggaggacgttggtccggaagggcacgccctggaagccgagctcgcggaacggaatgtcgacctcgaagtcgccctcggccgcctgggcgatgcgctcggcaaacgccttgaactccttgttgagctgggcccggcgcttgcgctcttcctgctcgagctggatctcgtcctcgtcgccgtagcggtacttgcgcttgcggttgcccgtctcgtcgaacgcgacgtcggtcgcctcgcggataaactggacgtccttggccttcttcttgccaatcatgatgggcgacttgaggtgaacgtggataacgacgatgagctcgtcgtcgcacggctggaagaacaggtgcttgatgttactgaaaaggaggtctaggaacgcagcagaggcgtcagctagggcaggcaggcaggtcgaagttcggaacgggggccacgcaccgacttgctgattgttgtggttgaggtaccggataccgttctcgtggatttggaggtcgccggcgagcttcttgttgtcgggcccgggccggatcatgacgtcgccgaggacgagcggccgcttgccgcgcatcaccctgagcttctcctgctcgaccacgtcggcgagctccttcttgtccttctcgcgcttggtgacgagcgcccgcatcttggtgatctggtcgtagatctgcgagaagtggtggttgtcggtcgtccggaacgtcgccgaacggatgaaggtcgcgttcgggtcctcgaacggcgtgtcctccttcttgcccgcgatctggccgggcgagttgaagttgatgcggaggtacgtcaggtcgccctcctccgacttgctcgcattcttgatcgtgttgatgtggaacggcgtcgcaaagccgttgatcggaaggacgatcgtctggcgcgagtcgtcgacgtagatctgcatagggatggcggacgcgggcatctgtcagccgagtcgcacagaccaggagagcaagattgacgcacccggaagttggccacctgcttcgggagctggtcctccttcttgtaactctcgtagcgcttccagaccttcttctcctcaccgcccttgccgtcgccgccctcggcaaagcgttcaaggccgcgctcctgccgctgctcgtggagctgcttctggtgctccttgagcacctgctgcgcgctctggtccatctcggcgccctcattgcgcgtcttgccgcggaggaccttgttgccgacctggtagcccgagggctgcttcacgggcgagacgcgcgacgccttcttcttgggcgatgaagcggccttcttcttctcctcctcgtcctagtgtcggggcgggaagagagcgtcagtcccgggccgaacttagcagggactgttggacgcacgccgcccatgaagaagcagacggcgtcgaggctcttgtcgccgccggtgagcgggagaccgccctccttgccgaccttgaccgtgtcaatcagctgaagcgcgtacgtctcgtccttcttgcccttgggcgccggcaggccctgaaaggcgacctggaggttgatgaccatgccctcggcgagctgcttgccgttcttggccgacatgaggaaggacgcgtcgcggaactcaaggccaatctgcgtccggcaaaggaaagatattgtcagctgcgaggcggacgttcacccgctcgaagaacgcacgcgagcaccaaacgacttcacgaggaagtcggcgagctcgggcttcttgtcgcggacaaagtcgttgacctggccgatgacctccttgacgacggcgcccgccttgaagagcgagatcatgtgcttctggacgtcgagcaggaaggcgtagttcttctcctgctgcttggccgggtcaatcaggaacgtccggccgatgttggcgcagtagctccggacccggagaccgacggtcgcgaggatgacgcccgccttgagattgcggccgtccgactcggccgacggcttcaggtcgtagacgccgcccgactgaatgatgggcgtgtagatccagtcgacggccgaaaagtcgacgtcggccagccgcttctccttgttccacagcttctcgtccggcccagcctcctcggtaccgatcttgctctcgatgagcgccgcgaactgacagcacgacgaggacaatgggggtcagtattcaacagctggcagccggtacgagcaaaggcagcgcaccttctcgtgtgagagctttcgctcgttctcaattgtcgccgtcattttgtcgacaaagtagccgctgatgatcgtcgagttgaggagtgccgcgatctcgaggtgtttctgagcgaggccgaagcagtcagggtcagccccgcacgctacactcaggcggctgccaggatcaacgtacaagctcagccgcgtccttgacgcccatcgacgtgctgatggccgccgcaatgtcgatgagctcaaacttcttgggctcaaagctgcaagatctgacgcgtcagccacttgcgggcgggctcctaccgagcagctctcggtcgcagactcacaccttagtccactcatcgacgagcttacccttgtgtctctccttgacgagcgtgccgactttcttgccggcgccggcgcccgcaagcatctcaatcgtctcctggagggcgactgtggtcacccaggaagccagggcggagcgcagcacggtcagcgagcccatcctgcccgctctatgagagcgactagaggaggcggacgacgcaccagcagaggcggccgggtccttcgggttgcggatcttgagcgtcagcgtcaggtcgtcctcgagcttggttggcttgcggtcgatcagctgctgcaggatcttggctaagggagagtcgccggaagtaaagcgcagatcagtacgagagctgacggtacggccgcttgctgcgacggagacgactgacccttggaaggcgagcagaggaacgtgatcgagtcaggcgtgaagaggaggagcgtcgacggaaactcgtatccgagcagccacgtctgcgcagacgcacgagcaaagcgacagcgacggtcagcttggaggtttgaagggcaagccaccgaacagctcgactgctcgagccagcgctcgacaggggcgcgcatgcagcagccgtagccggtggcgaggcaggctcacgagcgcgacggagaggatgcacgcacctggagcgcggtcgacttgcgcgcaacgccgtcggcctcctcgggatcgccgacgacgatcagaagtccgtcggcatccttgacgggagcccagtcatcgtcagtgccctcctgcatgcgccgagaggtaggttcgggtcagcaatttgggccactgaaggctgtctgagccggccgggtcaacggcgtcgacgcgccgagctcgccagaagtgacggcgaggagccacggcagggacgcaccttccacgccgtgaggagcgcctgggcccgagcgtagaaggacggagcgtcgaggcggatgtcagacatcggcggctgggctgctgtgaagttgcgcggtgttggtgaggtttattggagccagccaacgtcggcctgccacttgctcctgctgccctggcctggcgcgcgctcggcggacgacgcgctccagcgctcgccggagattacttgaaaccccgcagccggcgccgacattcatatacccgcgtcgcgttctcgttcgacaagtcgtcgcgcgcgccggcggccgagtcgtcaactgcagcacagctcgcaacccttggcccttccctccgacccgaccaccaccctgaccccttcccctcttatccctttctttcttcctccgcaaacatgtccgccgacgcccgtgtccccaaccgcatcgatgcctacgccaagttctggcagaaggactcggccgccgacagccagaccgacaccgacaaccggctcgacaactacaaggaggtcgtcaacggtccgtcgctctgcctcttcctcttgttcctctgctggcctggcgctgatacttccgtgctgcgctctttctcaggcgtgagtcttctctttccacgagtgcgatacgcgaccggtcgccggcccaacgtcctttaatcaaagggtgtcggcgccgcggcgcgtcgcaacaggcgccgtcgctttgtcttctgcaggacgaaagtcaaaagaggcctgagctgactcttagtttcttctgcgtgctgcccctttgctgctctgtctcccatctagtactacgacggtggtgagtcttctgtcgcgtctcgtctaccttgggttgctgtccaacgcgtctgacgcgtcctcccatgttcttcctctaccgccagccaccgagctctacgagtacggctgggcccagtcgttccacttctgccgcttctacgccggcgaggccttcaaggctgctgtgcgtactctccgatcctgattgcttgctctggcgtcatgctgacgtctatgctcgcacctgcacgcgtccctcagctcgcccggcacgagcactacctcgctgcccagctccacctcaagaagggcatgcgcgtcctcgacgtcggctgcggtgtcggcggccctgcccgcgagattgcccgcttttcggacgcaacgatcgtcggcctcaacaacaacgatttccagatccagcgcgctcgcaagtacacggccaaggccggcctctcggacaccgtctcgtttgccaaggtgcggcgacgagacctcttttgttcctgcaagcaataggtgctgactcttgctccgccggctccgcttccagggcgacttcatgaagctctcggagcagtttggcgaggagtcgtttgacgccgtctacgccatcgaggccacggtccatgccccgtcgttcgagggcatctacggcgaaatcttcaaggtcctcaagcccggaggcatggccggcatctacgagtgggtcatgaccgacaactgggaccccaagaaccccgagcacaagcggatcgcgcacgcgatcgagattggagacggcattgccgagatgcgcgacgccaagaatgcctacaacgccctcgtcgccaccggctttgagagtacgtcctctgggcccccgcattcgaggtgcaagccttgtcgctgacctgtcgactctgcgaccctccagtcatcactgccgaggacctcgccgaccgcccggacgccatcccgtggtactacccgctcgagggcgacctgcgcaagtgccagaccgtctacgactacctcaccgtcttccggacgtccaaggtcggccagatcatcacccacaacggcgtttgggcgttggagaaggttggactcgtccccaagggcacgttcgaggtcggagagaccctccgcctcgctggcgccgccctcgtcgagggtggccagcagaaggtgcgtcgcctgctctcggtcgacgactacaagacctctcgcgctgacgcttatttcgctgttccagctgttcacgccgatgatgacctacgtcgtccgcaagccgctttagacgccttcttcgatcttagacgctctcgccttcctttcctccggatcttgtagcaatctgtgtccagcaacctcattctaccggacattccctacgccagacttgcacccgcccgcgacttgcacgcaccctcgcctcaccggcctttcccttttctctttgggttccttccttcatctttcgcacaccaagcacaccaaaagtataccaatgctcgtcctgagctgggctctcgctctcacatgcttgcgtcgtcaccggctgaagaacacagaaacgacaggctagccatcaagatcgcatagcagccgagggtgggtctcatctaggaacgacctcggccgccgcccttgcaggttgacaactccaccgccagccacggcttcaagcgctcgccgcaagagtactcgtaccccgtctcgagcgtctctgggaagctctagccgcccgccctctgtaacctcatgcctgtctccgacctaattgacgcgtgaaacggatcctatcgtgcaaaagggctctctcataaagaaggacagggcgagtacaggtgggtgagatgcgacagggcaggaagcaacaggggcagggaaagggggcagaagtggacggacggagggacggcacagacggttgcgcagacaacgaagattagggctgtccgctctggggctcaagccaataaggctgccgcggccaggctgaccaggtagtaggaaagacaagggcgacagtgccatgtgcactctagcaggcacaggcacccttgtctgcgctgccctctccgagctggacgccatccctgcgagcaccggccgcagcgttggccccagctcctgcgcgcgtcggcggaggcggcagcgccttagctgtcgaatggggatccacaggcacgcgagtcagcctcagagtacacgctgtggttggccagaggaaggaaacgcaccgatccgctcaaagacctccttgacgccctctcccgactttgcgctggcctccataaacagcaggccctcctcagccgcgtacttctcggccatctcgcgtgatacgcgccgtgcctctgggttggcctcaacgatgtcgagcttgttaccacagaggaggatgagcagggacgggtcggcctgccggcggagcgactggatccatgacttggctttctgcgaggagcgacggcgggcgcatgtgaaatgtcagctcgccgccttctacttgtgaagatccccttgagacgcacctcgaaagaggcttccggcgcagaggtgatgtcgtagacgacgagcgacgcctgtgcgttgcggctgagagcaagcaaggtggagtcggcgtcagctataaaagaccgtcgacaccgccggcaataagactctgcctctggcagatcaggtgcctagctgcgcgaaattcttgaggactgactagtagatcggtgccagagacttgtagcgctcctggccggcggtgtcccagactgcggaacaaaggcgtcagtcgtctgataacgccggaagcaggcaacgctggccgagccggccaactcactctcaaactggtcggtcaaggtcggaagggacgtcagatcagcttatgagcgccagtcggacgagcccagattgaccagctgcgacgaaccttgatcgtcttctcgtccaccttacacgtctgcgtcaggaaggcggcgcctgccgacgaacaagcgggtgcgaggccatcagccaccgtgtaggacaggatctcaagaaagctgctctgagcatcccgagagacgagcacgcaccgattgtgctctcccggaagtccgagaactcgtctcggacgaagcgcaggacgagcgacgacttgccgacggcgctctctcctgtcggacggtagcagccgcggattcgacggacagcccggaagggacgcgcaaggaagtcagctgctgagagatggcacagatctagagcagtcatgcggctctcaagctgccagcctccggactcggcgacagcgagaggatgtctctcgctggcagacaaccggagccagaggagagggccggccgctgagcgccacgatagtcgccagagggacgcaccgagcaggacgagctttgccgattgcgtagccatttggatgtaaggagttcggtcgtactagtactggaagctgaagaggtctgggcagagaattggtagtgatgaatgggacggggtaggtcgatggtgggagacaggttggggcgaggccggccgtcgggctgagcgaacgaggcgcagcgggctgccagcaagtcgtcatgggccgagtcggtcggtccgactggtcgtcgctctcgtggaccgtcagcacaagagatcacgcagcgtccgggagtgttcagcattctgctcgcaaccactgcgatcatggtaaaggatcgtgccaggagaaggaggtaagccaggtactcggctcgcctgccgcagcggagcgcagcagcagtcgaagccaaaggctcgaccgctgccttccctttgaccccctgtccgccatcctcccttctcctcgacaccagacgcctatcaagctaggacagcaatatggccccatgatcatgcacgagctcgccacgccggtttggcagcacgaggagcctccgatactggaccctatcggcagcctcttctggcacgtttactcgctcaggcgggcacaggaggccctccgcaactgcctgctggtcagcaagatggtaaaggtatgtgagcgctactcctaatatgaacgagtgccaaagctgacccatgatgatgctctgatgaaggccatcgccatcccgctgctctaccacagcttcggccaaccttacatgacctcccaaatcctcaccaacgagctcgacttcgagttcgtcaaccacatggagttcctgtcggacgagcgcctccgcggtcggctcaaggcggtcgagcggcacgagcacctccgagagctcgtccggtcggtcagcctgcacgacccaaactccctcgacctgcgcgtctggaagctgctgccgtccctgccatcgctcgaacacgcaagcgtcgtctggaggtttttcgggctgctaataagcctgctagcggtcccctccgtctgactcggctcgaactcttggtggccgaggatccagacgcccttattccggatttccctttaccgaccgccgcgcgctttgacctctcgggcgttcgggaccttaggatcgagtgctatcccgacaactactctgtcctcaaagactctctctctctttgcgccaggctcgacgccctcgtcactcgatttgcacctcctcggccgcggtccgcacgaggtcgtccttccgacggtcgtccgcaccctcgaaaggcacggttgctcgctccgcaactttgccctgaactgcggtctcgagggcgagcgtccgaccgagcgtttgcccctctggcgagcactgcgtctcacctccggtgcctcaagcacggcatccagtcgtaccgctaccccgacgccaacgaccgccgcagcgtccgatggcgcgaccgggtctgggtccccctgctttcggatctcctctcggccggccacgagaagctggaggagatcgtcttctcttccggcgatttaggcagttccgaccacatcccgtttttcgagccggccgtcgaatacctccgggaccaccttgtcgggggccaggcgcttccggccttgtcgcggatccatttcgccgccgtcaactttacgagctcttggctggcggaccatgcgctcgccaagccgctgcacgatctcgacatcgagctgcgcgactcgcgctggcgcaagtggccggttgtagcgccagtggcggcaattcctttccctgcgtcggccagctcggcgtcgcctgaaagcgtaagagtcggataacgccgccgccgaaacgagcggaggcgacgcaagcgaggtcgatgagcttgccaaggaagaaatcgacgagctggccgacgacgcacagcagtgtcgtctgacgcactttggacgttggcccgagacccgccctcgactactctttgatctcaatgactggccccacgtcctctgatctttgagtcgatgaccgacgcagcacgtgagggcgagagcccagctcggggcgagcactagcatggttggatggtcctccatctcagaatcaggggcctgtcagttgcgatgagggcgcctagcgagggcgccgccgagtccatcttcgctcgtcccagtctgctatgcgatgactgactcaagtgccgcaagcagaagagggaaggcccatgggattgaagaggagatcgtcgtgtcgagaggccgtgagggaggcagcaaggagggctgggggtggcgtgagagcctgagcgcgcggcatggggaagatgcggaggagatcagggagagagcgagacagctaagatacagagggcgggcggcggctagagcttgccagagacgctcgagacggggtacgagtactcttgcggcgagcgcttgaagccgtagcgggcggtgaagtcgtcaacctgcaagggcggtggcggaggggtcagtacttctccttgtgcaagatcgacagcgcatgaagcgtacctgctcgggtccccgcgagccgtacgggtacggctcgggcttgggcgcctcgccttccttaccctcaatccagtggaggatgggcgtgaagatcttccaggcggcgtcgagctcgtcgtcgcgcacaaagttggagtggtcgcccttgaaggcgtcgaggatgagggcctcgtaggcctcggggatcttggtgtcggagaagcgccggttgtaagtgaggtcgagctcggtcggcatcaccttggtcgcgaggccgggcgtcttcgagttgaacttcatgtagattgcctcggacggctggatccggatgacgagctcgttccgggcgatgtcggagaagatgccctgggtgacgtccttgtactggacccggatctcgaccttggcctcgttgagcgccttgccagccttcatgatgaacggcacgccctcccagcgagggttgttgatgtagaggaccgtctcagcaaacgtcgggcagttggagcccttagggaccgtgtcgtcgtcgaggtacccgggcttgtcgtcggcagcgacgtactggccgaggaggacgtcctccttcttgatcgccgggaccgcgcggaggaccttgaccttctcgtcgcgaatgtcctcggccgagaacgagacgggccgctccatcgtcaggaccgagagcgcctgcagcaggtggttctggcagacgtcacgaatgattccaaactcgtcctgcgcgacaggaggcgtcagtcaggtggttttgcagcgaaagcaagccaggtgacgcacaaagtagccgccgcggccctcggtgccgatggcctccttgaaggtgatctggacgttcgagatgtagttcttgttgaaggcgctctcgaggaacgagttgccgaagcggaggacgagcaggttcttgatcatctccttgccgaggtagtggtcgatccggaacgtctcgtcctcggtccactcggccttgaggtcggtcatcatctcgcgcgacgacttgaggtccttgccgaaaggcttctcaatgacgatccggcagacgcccttgtcggccttgatatagttgttcttcttgaggccgcgggcgaccgggatgaagacggacggcgggagggccatctagaagcggcaagaggaggctgtcagcgagcgtgtgcgaggcgtactcgcagagcaagaagcaggcctagaacgcacgtagtagatgcggttgacgtccttgccgtccttgtactccttctcgatgccctccaggtgcttctcgagctcctggaacgccgagtcctcgtcgtaggcgccggcgacatacgttgaaatctttttgaactcctcgagcttggccttgacctcctcctgcacgacaaatgaggacatgcagatagtcagcaatttgccagcagcggcgattaggagagcagaggcgagcagggcgcacgttctcctggtctttgatgaacgagatctcgcgcttgtggaactcctccgggtccatcttcgtccgcgcatagccgacgatgtggatgttgtccggcagaaggccctggcggaagagggcgaagagggccgggaaggtctagcagaaggcggtaggagaagagccgggtgaagggatgccggtcgagcggagcatagtcagctggcgcgttccgcgacgcaagctgctgtcgctctggacggaccttcttcttggccaggtcacccgacgcgccgaggactgcagacggtttcgaaagagcgagagtcagaggtcgagcatagaacgagatggctcctgcccggctctctccgagcgtcggccctcgtccgcgcggcggatcccttcgtccggcctcgcggccttacgacgccggccggatcaccccagccgagatagacgcccgcccaacccccccgctgcaatacgacgagagcagggtgccctgcgatgcggctagtcgacgctgcctgcccgtcgacgaggtcgatggcaggaggaggccccgcgcggggagggcgacgtcatctgccctgttcgagctcgagctgacccagccgccagctttgtaagagcgagctggatggttcgcgagaggcgcaaccgaaggctttgcccggcctggcaacgacaatgctcgacgacgaggaatggctgtccgaccgagccggagagccagccgagcccttcccatcggtggccgcgcgcgcgcgcgcgagagagcaagattgcatgagaagagctggatgtacgcaccgacgatgagcgtattcttttcgagcgcgacgtggctgccctccatcgaggggatcgtgccggccttctcgttcgacatgctgggctgctttttgggaaaaaagggttgaaagggcgctggttgtgggaggagtggtggatgggaggaaagatgcgagcggccgggcgttggacggacgagcacgtaaaacgaagggcggcagcggcagcggcgcacagtcagcccctgacaaagctcgctcagctcgtcccaagctcgcccatgtcgagctcttgtcaccgagcctgtgatatgaaggacgtacgcgaaaaggagactgtctggcaagcaaagaaagaggcagacgggttagggtcgagggtcggagggagcaaggccgtgctgccggcaacagccgcaacctcgggctgcggcggcatctcgacctcgtccggcccggccacgacccggtcacccagcccagcgaccacccgcccgtcgcgcggccgtcggccgtaggaatgctcgtgcatgcagggacgtacaagaggttgcgattacgaacagagcagaaagagagtgtgaaggtcgcgagatgcagcgtcgaggaggaggaggatcgcttcgcagggtggaggcggccgcagaaaaacgaacgccatcggcttgctgcgcggctcggccgacgacctcgaggacaacacgctatcggccgccgtcgcccgagcagtctttcaagcaatcgaggtcgataaggatcgcatcaaggaatacatggggagcagggaacggtggacaaggagagtgaggcatgaggaggttgtgaggggccgcgctttactcgatcgggaccagctgatcgtccgggacggccgccgccttcgggtaggtgatcgtcaggacgccgtcggccatcgacgctttgatctcggagggctatcagagagaggagagaggcaacccgtaaagacccgatcgtccccccccccccgcctcccattgccccagctctctctaatgtatccatgtctccgtaccccgctcggccgtgagcgtctatgctgagggaggtcgccatgtctatcccttgcaaagcgcgacgatgaccgcaccggcgccagcgccgacgccggcggcgatagcgagcgctcgttccgacgacgtcgggtcgttccaggcccgcgcgcagttctcttgggcgaccaccatcgctttggacggcagcgcgagcagatcgggtgaggggtagtgaaaggggaaggtcgggtgcggcaggaagagcggtgttgccggcggcttgagcagatgcgcgaccgagggcggcggtagggcggcggggtcgtcggccagggtcgacaccggtggttcaggtaagattattgatggacctgtaggcgccgtgactgggctgccaacaagctcctgggcggcaacgagctcttgccgcagaccctcgacctcggctcggatggttgttccgagctcagctgtcatctctcgcacgcggccctcgaagccctcgaccatcctgcgccgcttccaaggctcgacgacggcgacggcgccgagaaagaggagcgcattgacgccgaggacgagcagctgcgtgtaggacgacaggctccgaagcttgtccgaccacgtctgctcctcgtgatagcgctggaggatcgcccgcataagcccgtcaaacgcccggtcggcctcggcctcgagccgctccacctcatcctttgcttgcgttgcggccgacgtcgactggtggtcctcgcggacgaggagtgtgaagcgctcgacgtccgaggacgaccacgagtgcttgcgctgaaggaggtcgttgagctcgcgctgcgaggacgaggcggacgagagcgtctgatggtacgttgtcttggctgtcgtcagggccgctcggagctcggtcagggcgtcctctgcaggcagcggagggatgagaaggagaggggtgtcagcgactgcgcgcggcgagatgcgacgacggcagaccgacctttgacacggacactctccttcagccgctcgatcccgtcgtacccagtcacgctgttgacacgcccgccgacctggccgaagacgagcttgccagctgttaagagcctgacgcgctcctcctcgagcgtcacccgcgtcgtccgcatgccgtcctcgagccggacaaaggcctctgcgagccggccgcggacgaggtgcgaggtcgagacgtagagcgaccgcaagcggaagagggtcgtcgccacgtcggtcggcagcgggaagggtggtcgccagtctggaggacgaggagatgacgacgaggaggacggcgacgaggatgacgcgtcggcgcgggacctctttgacagctcgtcaggcgtcgaatggtcggcgagctttgacggcaaggtagctgctggactgctgccctggtggtcgatatgctcctcttgcgagcttagacccaaagaccgagcgctaggcgtcggttgcagagagtctggcgactcggcagatgcctcggggtcggccgacagttctgaaggcgatggtgccggcagggcgatcacgtctgagttgaacctctctgcctcgaccggaggttgactcgcccgctcatcgtccgttctggagcgagctgcgtcgctagacgacgctgacggtggtgtcgagtagggtcgtcgaagactggccgtcgtcgtcgtccgcggccaggcccgaggcagctggcggcaggcaagcggaggcgccgtcgacggtccgacatcgagtaggcaggcgagcgagcagagccgggaaggatggaggttggtcgtgcgtgccctaggcaagagcgggagcatcgctccctaaatccgagggagaggtagagatggttcagggtcaaggggtgaggtcggacgcttggcggagagtcgcagccagcctcttgacggccatcttctcttcgaccgaccctttctccctcctccctttccgtcatctccagcacgcctgagatgaactatatccagctcgagaagcttggtgagggcacctacgccagcgtcttcaaggtgcgtcccagcagctcgaggcaagctactgcaggcactaagcggaaggaacgacggtcaggagctcactcaaccctccttcttaccccttgctccttcccttctaccttgttcaacgacccttgctgtctactctcgctctcggcatctggtctgatacgggcgactatctctggcgcttcttcgtgcggctcatcccgctcgaactctcgctcgctcgacgctggccctacttcgctgctcctcctcgttcgacctgtccaccgctgccgcgcctcgtcgactcgtcggcactctgctctcaccacgtccttcggtgctgatgcttgctgcgaccgttgtcgtccggctcgtctgctttgttctcggccggaccgtctctatctctctgctttgacctcggcttcgacctccgctccttcgacaacgaccatgtccactgcgcgcctcgtcaccctggcatcgccgctcgcagggacgctcgcggacgaccaacgagattgtcgcgctcaaggagatccatctcgacccggaggagggcacgccgtcgactgcgatccgtgagatcagtctgatgaagggtgcgtggcgtctccgtggcatccggaccggaccctagctggccgcccttgagcaacggtaggcgcagcttatcctcgtcattttgtcgctgactcacattttccactcgacccgctcgcagagctcaagcaccccaatatcgtcggccttcgagacgttattcacaccgagacgaagctgatcctcatcttcgaggtcagtcggcgcgcgtctgctcacgttcagcagaggcttgcgcctgaccagcagcccctcccgccttccagttctgcgaccaggatctcaagaagtacatggacacgcacggcgaccgaggcgcactcgacctggggaccgtcaagagtttcatgtaccagctgctgcggggcgtcgccttctgccacgacaaccgcgtcctccaccgggacctcaagccgcagaacctgctcctgaccaagcggggcgagctcaagctcggcgactttggcctcgcacgggcattcggcgtccccgtcaacacgttctcgaacgaggtcgtcacgctctggtaccgcgcgcccgacgtcctgctcggaagccggacctactcgacctcgattgacatctggtcggccggctgcatgtgcgcctccactgcacctcacctgctgcctcgtacctgcctcgtgcctgcctgaccacccgagagtcgctcctccttcaacagcatggccgagatgattctcggctacccgctcttccgaggccgggacaataacgaccagttgacgcagatcatgcgcatcgtcggcacgccagatgaccgcacgctgcgcaagattaacgccgactcggtgcgtgctcttgatgtcctcgtgcactggcactcgtctgaatcactcaccctgtgccgttcgcttcctctcgctctcagcccgagattgtcctccggcctttccagaagtacccccggcagccgttccacacgctcatcccgcgcgcgccaccggccggtcagtctctctttctcctgctccgtaacagcgtccctttgcctaaccgtccttcttcctcagccatctcgctcctcgagtcgctcctccagtttgacccggccctccgttgctcagcgcacgaggcgctccagcacccatacttccagtcgtcggcctcgtccgctccggcaccgcaggccggcccgcagccgacgagccagcagcagcagcagtatcagcaggcgctcctcgctcagcagcaacagctgagggcgcagcagcagcaggagtaccaggtgcgactcgctggatcgctcgaatctcgtcgtcagtcactgatcatgtcatctcgttcgtggcaaccaacagcagcagcagcagcagcagggcggacagttttaagcctcccttcgttcgccgctctccggttccatgcttgcctccgtcaaatcttgctctcatccgtccgttctacaggaccagcccctcgctctctcccgcaacgtcgcctctcgctctcgtccctcctacgcaacgccctctgaatacgatctgtctgtctctctctcacgagcatctctcctcgcgctcgactacattgcctccgccaggacgcgtcgcaacctctcaaactttaacgcccatgctcggtgccggaagctgacggacgcaacttactatccaccagctgcagcatcacgcctatcccgtaacagaccctcgtcttcgtccaggcagcggtccgccaacagtacttcgcgttacgggctgcgccggggcgactgacggtcgcgtgttgaaagaggcgcgagtcggcggcgccacctcctcccgctgatcacaacaacgcctccccagaccgctgctttccgctcccgccatgcgcgctttcacatgtttcgggagcgcgccagcggccgatggtgccttttcgttcgctaagcttccgcctgccctctcacctccagccagcaccgaccttcttccgtctgtctgcctttcgcgacaaaagaccaagctcgttcagcactcgccagctccgatggtcctctcaaggtacgtctgatcgctctctcgtctggtctctcccgcgaccgcgtctgaccggtcctgccagcctcctctcttgcttccggggcgacccgtccatccgcctgcctgtcgacggctctcgacgcaagtcgtctcactcgtccattacgctcggtcccgcttcggatgcggctgccacgatgcaatcaccgtcgatcgaccgctccatctcgctgcgtgaagtctgccgacggattggccgccgacctcagccgcctccgccgtcgcctgcggcctcgaagccggcgccggaagcaatgccgagccccgactacgagatcgaaggctggtctaagacgtttatgcggcagcagcggccagagtgggctgcgtcgcctgtgagtcgaagccgcttttaaccgccctcttgctaccttgctgatctgcgacgctcgccctgacagatttcggacttgagccaatgcaagtacctcgggccgcaggagctagcccgtacgcggccggctaccgcaacggacaccgtaacgagcccgttcgccctcccctcggaccccttccgccgagccggcgacttgccctcgccctctggcaagcccgcttcggcaagtggtgccttcggccgcgccagaggcgaagcgggacccgttcgactgtcggctctttttgcagcgcacgagtctgccgccgcgagcccgaccttatcggccaggacgagcgcgttcgaaccagaggtcgacgtctttggcgaggtgcggacgccgccagagacggtccgtgtctcgcgccgggcctcacgccgtcactcgaaggaagccactccgcttccgatggtcacctcgcctccgccgctgagcccgctcccggcactgcccgtccaggctaacgccagtctcaccccgagcccgccgaagggcaagctgccaatggtcgctcgggcggcagtgaccagtcaccgccgcgccgactcggacgtctcgcagacgtcgtccgtcgtctcgtcgaccggcagcgccaggggcacctactttgacgcctaccgaccgattgctccggtttcgccaatgacgcccgcgtcgctctccagcccggcccactcgtcgactgcgtcgggcccttcatcggcagcccgcctgcttcccagcagcaacagcgataggccccggccgctctctcaggacgtccgacgtcctgcaaaaggatcgcgccgcggccctgccaggccagagacggccgacgacccctgcctgatcggcaaggaggccggctaccgacagagccctccggcgagctcgccttgaggcctgcctgcctgacctttcctagtccctgctacacatctcagtaacgatctctctctgtccttccctatcaatgtcgatgccgtcgctcgggtttgagactggtgtgggaagcgggccatgtctcggcaccgccctggtctacttagtatcccctccagcggcgccaccaatgcgaggcaccggcgtgttccagaagcggcggacctcgcgccggccctgctcgccagcctgcgtgccaaagccgagctcgccgaggacgccgccaatctcggccgagcccttgccaccggcgaccgaggcaatcatgccgtccgggcccgagacgaggaagagagtccgggcggtcggcgagagcggcgtcggccgggacaagtcatccggctctgtctcggacgacggcgcgctcgacgaagcagccgcgggcgttgttgttgacgacgatgatccgaagagcgacgagatcttgctgacgaggccactgctgggcgtagcaagagcgattggcttgccggcgggggtgtcgaaaaggaggccgcggagggcgtcggccgtcaccctactaggtgagaggtcgacgagctcgagccgggccggaagccgctcgggctcaggcaggtgctcctgaaccatctcgagcgtgagcgtcgggctcgcgtgaatgagtgtcagcgtcggcaggtcggtcggcggggcgaccggcttgacgcgctccggcggaatgagcgcgtgaatgagctggaggaaaggtgcgatgccggtgccgccggagatctgtcgcccagacgcaagagagagagtgtgtcaatgagctggccgcgagcagggcgactgcgcgagcgaggggcgaagacactaaccatgacgacgcggtcccagccgcggagcgaccagccctcaccgccagcctcgttgccgacccggacgtcctcggtcagggtcgggatcggcccacggatctcgggccattcgaaacgcttgagactgtgaatgtagcgcgagacctcgccaccggcctccttcttgacgaggagcgagagctgagtcgccgatccggtcacatgcggcggcggcgggaagatggtgtacggctgacgcgcaagggagaacactcgtgagccaggggagcaggagaaggggaggaatgacgacttacccgctcgatctgaaggttggggtccttgaccatcaagtggtagggcgctgcctcggacttgaggttgcccttgaccatcgggtgctcgtccggcaggcgaagcgtgacgaccttgtaggcgccgtccttgctgtcgggcgagccgatgacctcgatccactcgaccgggaagcccttgtactcagtctcgctcaggaacggcatgtcggccggcaggtagatgcagtagacaatgccggcaaagacgatgaggcagatggcaaccttcttgaagtcgttgcggggcgcaagcgtcgctgtcgggctcccgcctgagttcgggtcaaccttgtggttgacgggcgagaagcgctcgagcgaggcgacgaacggcgacggtggttggtgcggaagccggacgcgccgagcggccgagagcgagaaggcacgcgacgaagaggttgccgaggacagtctcgggagggctgccaggcggccgagcggtcgaagggcagaggcagacatgcggcccaggcagtcgatcggccggaagcgagcgaagtggagaaggaggaggagggtaggctgcgggcgagcttccgagccgagtgggcagggagcgagagggaggcttagagaggttgcaagccgccggagagagctcaagataggcctcagctaaaagtgcgaaaggtcgggatggatgctgatccggtcagacgaggttggagagaaggagcgacggtggtggtcggagggtgcagctcgatccttgcgccctggccggccaagctgaaagaccgtcgtctgcggctgacaggatcggtcggcagcagactctacttcgtgcacaggctgagctgctgacagctcatgtcgacacgaatttgcaagcgaaacaggacagggtcgattcgtcgaaagtcatatgagagaaagggtgcacagaggcaagggggcttgtccgagccgccgacccactcgttcctcaccaggaaatcacgccctcaaaagaagagccgagcaaagggtactgagacgctcgtccacctccgacctcagagagctcgaaggacaggtcggtgtccatactcattgacgctcacccttcgttgtcgaaggaaggggagcaataagggggaaaccttgaaagagtagggggtctccccggccgcacggacgctagaaaagggcacgaaaaagaactcgggtcagtacgactgagctgcgagaatgcacgggggctgcgatggcactcacgggatggtcgaagatccgagcaggagcacggcccaagcagcagaaaataagggggcgccgcccgccggggcgcgtgtgtggctgggccagcttgcagcaccgctcttcaacgtggccaacgctgcacgtgcaggacagtactcatgaaggccgacggcacatacgctcgtctcttcgtcttgtcatggctatctcaggagtctcagacccagcgtccgccgccgtcgcgcggcttcggactcgatctggcagggctcgggctcggcgacgacggatcggcgccgccgagcgggcgagagaagacgcggccgccgccgcccgtcggcgtcgttgcagtcggcgacgaggagccgagcgaggtgccaaacaggagcgacgagagaccgctgagcgaggtcgaagatggcgtcgtctgtggcgcggccggccgcggtgagtcggcaattggcgagagcggttgctgggacgcccggattaccggccgggctggcgagggcgatgccggctccaagtcggcagaggtgaccgcctctgcaaggccctccccctcgacgtaaggcgaatcgtccgccgtcgtcccctttacgagccctgccaggtcgacctgatcgaagatgccgaggtcgcggacgacggccgccagctcgcgaccgtcgccatccacgctgtggaggaagcgaaggagatccttgcagagctcccactcgccagcgtcgatcgcccggcggaggacgcgaagcgtgtcggtcgagggcgatgagagccgctcgagcgtgtgaagcacgagcaggtacgacgtcgcagtcttgagctgaccggactggaggcaggcctatgtaaagtaggaggggtcgtcagccaaaggaccacgcatcgagctttcactcggggcgcacctcgaataggtccctcgggttgccgacgacagcgaacaagaagtcccagcgggcgacctccgtcttgcgcgcacagccgacaacaacggccagcgcctgcgggaagtggtctagaaactcgacaacgagcggcaggacgccgacgccccgccagagctttgacggcgctgacgatggctcggcaggcgagggatgtcctcgggcgtgtacgtcgtcgtccatcgttggtaggtcgacgtcggtcgagaatgtcggcgtcatcggcgacaggtctgagagcggacgcgtccactcgatgccatcgacgacgagcgggctcggcgccggaccctcgtcggcctcctgttcgagcacgccgtgaaggaggatctcgagcgcatgcgcaaagtacgagagctgggcaaagtgggcggcaaagccgacggcggcgcggatttggccgcgcgcgaggtggaagcggaggaggtgtgggaggaagagttgggtcgaggtgagaagtttgaacgtcccgaacgggatcgctcgccgaaccgagagctctgactcgacaccggtgatgatgcctttgtccatcaaaacggctgtttgtgatgatgaggaagcgtcagcaaaccattgcatgagggcgcgatcgagcgaaaacgacagacagagcggatagaagtcgagcgggatgctgacgctctccccgacacgcttgtagccaccctcgccggcgctgccttgaagctcccggccgatactctcgactcgatcgaccgtcagagcgtcaagccagacgcgcaagtgctcgccgtcccatgcccagagcgaattttcgagcgtaccaatcccggtgaggtgcgtccagtagctctcgacccggtcagcaagcacctggaggtcgtacctgacctcttcgggctcggtgcgaaggatcgaaggcgtccgtgtgtgcttgtgctggccgtcagctgcgggcgtgcttggcaaggtcgggagcgcactggttgaccgccggtgagagggctgacccgaggatgccttacgtggccggagaaggacgagcgatgagtcgatgagaaagatgacggtcgcgagcggcaagtcgtccgccgggttgccgagctctgtcggaggggggaatgacgatcaacaccctggtcattgaggcgcatgcgaggcggatgggtgaccaactcttctgcgagagcggaataagccaactcattgccctgacccggccaggcacgtcgacgacaccctcaaagctgatcgagccgcagagcctgagctcaactgcctcggtcgttgggacgatcagaaagtggtaaaaggtatttgccgtcgtgtagagcaggagcgaattgtcgtgcaggctgagcagctggatcggcgccggtagggggaccgacgacaagtgtgaggtcgccgtcaggtcgtcgtcgcgcgagtgcagccggagctattgaagggagaaaagcaggtcagggagggcattcagtagactgaatgcgacttgcgtgcggacgcacgtagtgcttgccagcctcctcgacgccaacgacgaggacgtggaggaaccagcacatgcctccgcggacacgaaaggcctcctcgtcctcctcgcgctcaaacaccttccagcggccgctcgtccgcgaccaggttgcgaagcccctcgtacccgcgacggcgacgagtctgccatcgtctgaaacggtcgcgtaccggaccgggtactggtacgggttgtatgccgccggtaagggaacggtgacgaacgacgacgggagcgagtggagggtcgagaggtacgtcgaggacggcaggctcgcgacgggcgagaggagaagcgcgcccggcgtcagcaggagcgggtagagcgttgccgagggcgtcgggagcgtcgtgaagctcgacttggcgacggcctggacgtagatccggccggtcgagcgcgagagaaggacaagctccaatccgccgccgatccagccgaggtcgcagacacccctgtggagccagtcttccgccgtcgcttcgtcaacagacgcgtcctcttcccgaacgccccagccgaggagtctgccggaagaagaccagaggccccagccgttggtccagccgacggccagcgcgcagccgtcgggcgtccaggcgagtgagtgcacccggcctggccgtagccggtgattctgcgccgctcggggtaggataagtggagccggcacgtgtggctcaagcgaaggtagcgagaagagatggatagcgccgctacagggcggatggcggaacgtagctcgtcagggaggaaacaggcgaaacgagggcggccaggagtgaggacacgcacgaagtgcttccaaccgccagaagacctagccggccattcagacccgctttgatggccctcgctctctcgcgcgtcagtgccaagggcttgtcggtcgcgctcttgccaccgccggctgtggctcgtgagggtgccggctcccaaagttcgacctcgcgaacgttccatctagaaggcgctggcgactggcggctgccgtcgccgttgatggtggggccgtgccgggccgaggatgttgatggtccgcccttctcgccggtagcagaggacaggtggacgtccgagccgcttgccgctagcgagatcgacgatcgacctgccatcttcgcgatggatgccgtcggcgccagttgggagagcacgaagcaggcccctcccggtaggacaagcgcgagcacgccaagtgctctcgagctaatcaactcacccctctccgtcaggtcgtccgtctcccctccgcacgatacgggcaggcccccactttcctcaccaatctccttccgggcagctccgcttccgagaagatcgaccgccggatcaagcgaaagctgctctggctcgatccgcaatttggccgggtcgggaaggttggacgtaaacggcgggaggggaaggtcgagcaacgccgggtgagggaagaggaggaggagtgtcagaccgtcgggacggatgatcaggctgtgcgaacagagacagagagcggtcaggctatgtctgtccgtccacgaaaccctggctccggtgctgcgcgcaagagatggcgcaaggaccgacctctccaagccgggcacgattgtcgcgctttcaaagcgcatcttcactccgccaagctcggcaccctcgcccggaccgggcgcaaacgtctcggcctgcttgcgcgcctgggcggcggtcgagggcgggatgggctcgtacggagggtaaggtgatgggagcaggcagtagtggaggaggacgtgcttggccgtctggcgcgcggatcagaagtcacggcgaagggacgtcagtacgcttgtgctccccttccatcttgacgaaggccttgtcgagaaggtgtgagccgaaggaaggacggacgacgacaaagacggagcgagcgtcccagctgaaccaagcgcgctcgaagcggccgtcccttgcaaggccagcttcggtccgtctgacggcgctcaggatgactggcggctggagtacaagaaaatagcagaaaagggtcagttcgctgatgctttgcggcggtcgtagagcctgagctcaaggtcgggcgggcctcgccttggtgctgtagaggaccagccggtccgggccgagggtgagcatgagctcggccctccgatcgaagacgacgtgatcggcaggaaggctacccggcgcatcgtcggcggctgcgaggacggcaggcgtcgagtaaggccagtacattggctaggcgagatggtgaccgtcttgcggcaagctggctagtagaggacgtcggcgccgccctctggcgtctcgccgccaacagcgaccccgcccttcgacccagtacgtcgccctgtcgccctcaggttcttctcctagcgtactgacaggcgctccctgtccagcttccaccttcccgaccatgtcctcgccgcccgctcccgcctcgcttccaccggcagcagccgacgcacccgcgccccctcagacggcgtcggccggctcgccgtctggcttcctcaaggtgcgtcttgactcgacgctcggctgtcccttttcgtcctccggacgagacccgcatctcagccggatctgtgatgacgaagcagggctagactcgacgttttgaagatcagtcgactgatctcctctctcgcctccgcaggccgtcgtcggcagcgaggtcgtcgtccggctcaactctggcatcgactaccgcggttcgtcccacgttcatctcctgctcgcttcagctggttgtcctcaagacgtcggacttgcggctccgtgggccgagcggagcaggctggacgttgccgggcttgatctgagcgggcggcgttagggcgctcggtcgtcctccgtgccggctcgcaatcctcgcctgatccagcgcgtagagtcttgtgctactagcaggcgactgtgcttcacagggcggcaccgcgcatcgagtcctaaagtcctcctgtctggcagggagctcgaaactggctgctgctgctcgtccggcgtcgggcgccaggcgggctagcacgagcgacggggtcgcagggtcgttctgcagggtgatcgagctcggtcattgtctggagatgacggtcagagctgtggaaaggcgtgcgagcaaagaatgccttgtcatcggagggcaccctcggatgggcgcccagcccgaccctcgctcgtctactcattacttcacgcttgcaccatttagagcgatacctgcccccgcttgagctcgctcattgactgtcctaccccttctttcggcaacaggcaccctgtcctgcctcgacggctacatgaacatcgcccttgagcacacggtcgagtatgtcggcggcgtccggaaagcagagtttggcgacgcctttatccggggcaacaatggtgcgttctctctcttgtgtcgatacttcgttagcttagacgagggctgggtccaagattgcccagactgactccaacccacctgcctctctcgtccccttcctcaccccttatcagtcctctacatttcggccgccgacagtctctagagcttcggctactcgcacccgtcccttcgaccgcccgtccgcgcgtcatccgatccggatctcacctcgagcgcgtagacttttgagcctctgcgcaagcctcgtctcgccctttcctcgatcgcggttatcgcaaaacccctgtacgaccctcaatgcacacgatgcccactctcccgcttgctcgagagagacactagaggatcggtagcctcgtcgctcgctgattgttggaggcatgaatgcggatacaggtgtcggacgggtgcgtgcgatgacgagagaagggcgaacacgaccgcctgcaggacgtgtgcgagcgttcgtcttttgcggaggctgttgttacagaatgtcgtgcagggggcggtctgagcggggccggaagcggagcgaagcgaataaggaaagtatgcacaggacggagcccggaaatggtcggcagggccgataacctgtgcttgaggtcgcactggcgcgagatgttaccttggtgaggggccgaaaaggacgggccgaatgtagtcctaccggcgttgagaaagacggaccctgttgcgaaatcgacggccagcgcggcgtgttgggccgatggacggatgaacgccgagagagcgggagtcgaaggataggtccggagggcaacgtaaaggaagtgcggcgggcaggccagcgcgtgtgtgcgtgcaagctagcccctttcggccttcctctacttgctcagccgacgccgacgaggcccactccgctcgcctctccaaccttctccttcgcccggcgcagcctctcctccctcctccccttgaccgcctcgacaacctccctcaaaccgagccggctccgctcgatgccccgtgcgaagcggctctcgccgaacgcctcgaccttttcgcgcaggagcagtccgaccttgagctcggttgtgatgacgccggtcgtctcgtgcgttgtcattgggtgagaagggtgcagtgttgccgacgacgcgagagggagcgccgttaacgagggttctgacgtcggtgccgacgacggcagaggtgcgctccttgacgacgacgacgaccaagccgacggccaccacgacgagctagatgcgcccaggctcgatcccgacgccgtcgactgcgccgaaggccaagcagccgaagccaacgaggccgttgccggagaagacaacgaggaggacgaggatggttccgcgccgccgaccgagctgggcgtcagcgcgctgagcacggcagcgtttgccgcggtcggccggagaacggtcgtctaaagccgcgccgtgaagcagcgcagggtagaaaggggagtggatcagccggctgcgcaagaagggaggaggcgtaacgcgctgccatccgctgctccctgctcgacgggcgccttctgcgccggcaagcctgcggacggccgccgggacgcacctcatggaccgacagcagatggccgtgattgatattccgcgtcgtactcttaagataacgcgacggtccgaacgggttgacctgcgccgcggccaatggggcggggggcaaaggggcagacgggcaggcaggggcgagggcagggttagcgacggcgttcttgagcaacttttcggggtcgtcgccctttcgagaaaggcaggccaaggagaacggcgcctgtcagacgctcgctcgcgctctcaaggccaggttcgaacgaccctctcgagagaggctgacgactaagaggacgcgccagagcccgacgacgcagacgagcttctagccgagacgagacgcacctcggactcttcgaggacccaggctccgacgcccgacccgccgacgagggccatcgcccacattggaatcttgccgctctggtgcgggcgagcagcgggcgaggcgaggcaaggcgagcagcggcagcaagaacgtcagcaccctttcgtcccttttgcagccggcccagagcgtaccttgagaatgagccgcgtcgtccgaacggtcccaccctcagtcacctccctctgcaggacgtcgaccgacagaatgtggcccgcatggcggttcgggtagcggcagaggaaagcgagcgcgaccgtcgaccaggggtccgggtggagctcggaggcggcgtagaggcgcatggcccgcacacgaagtgagatgggttgtcttgtcggggtgtcagggccgccgtctgtctgcgctgcttgctcgagggatgggcacggtcgtcggtcgttcggtgctctgctggctggacccgcacttcgcaggtcgtctgcctcttcactgtaaccctaagctcagccgtcggctcagcccggggacgaccgacgtcagtctaccgccggtcgacgacgccaacgacaacgacgccggacctcgccaacgatggctgctcaagcgagcacggcagaagcagcaccggcgacagcagcgaagtcgcccgagctccttcccaccccggaggcctttgccttcccttacgcgccagggccgtacccgatccagctcgcgctcatgcagcacctctacgcgacgcttgagcaggccaaggtcgggatcgtccagagcccgacggggacggtgcgtcctcttgcttctcttgactgcgtatggtccgagcgggtggaagatgacgggcttgctgtaactcgctgggcgaacggccgggcatgacgacgacgacgacggccagcgtcagaggcaaggacaacgcgtcgcgtcgcttgcacgatcttgcgctgactgcctccccttcatttgcgcagggtaagtccctctcgctcctcacctcgacgctcacctggctccgtgccgaccagcaccgccaactccacgccgagctctcatcctaccgctcgcggctcgaggccgagcaggccgaggccgaggcgcggggcgaggagcccgaccctccttgggtaattgagcggctcgtcggtcgcaagagggctgaagttgaggaagggaggaagagggccgatgagaagctgcgtcaggcgagggaggatgagaaggagcgggcgaggagggcagagtatggcgagcggggagggcagacgaaggcggtcaagcgggcggttcgtccctctctcctttctcctaggctcgcaagttcttccgtcctcgccggatgcgatcggaggtctttgtggacactctcttccgtagcataattaaagcgacatctccttcctcgtcgccaccccccgccggcctcttctcgcgactgtgcgcgctcactctgacatcctatccctccctgcatccttcagaagacgaagctggccgacgggcaagacgacaatgatgaccgcttccttccctctgaaggcacgtccagcgggagcgcgggcgagggcgaggatcgggcgtcgctcaaggagggcgagatgtacctctccgccgaggtccgagcgctcatggcgcagtgcgtacggttctgcgctgtttccttgcctcgtagctgcgcagcacagtgctaattccctccctctgccttctctacctcctccttactcctccgttctcaccctctcatgcactcacgcgctcggctttccccccgctcgcgcaggatgaacccctccctgcccgacccggccgacaccccgcctaaaacgacgccaaagatcctcttcagctcgcggacgcacagtcagctctcgcaggtgcttgccgagcttcggaagacgacttttggaggggcgaaggctttgtacagccctttgcactctgaaggggtcgcgggggaagagcaggagacgaagcctcttcgggcgcttgcgctcggctcgcgcaggaacttatgcatcaaccctgccgtcctttcgccctcctcggcggaaacggcgggagggagcaacacgcaagggctcgacgagcggtgcctcgacctgctctcgacgacgcatgggtgctcgttcctcccttctcctccggccggcaccggcagcggcggcggcaacggcggcgggattgcgaataccgaccgcggccgggcattcgtcgacggcgcattcgcggcagtcagggacatcgaggacctccgggcgtttggcgaggagaagggctgctgtccgtactatggcagtcgggcgctgatcgaccaggccgaggtgagtcgtttttctgcctgagtcgacttacctcccgctcacccatccctgctctcatccttcggcgcagatcatcgccctgccctacaaccttgtcctccactcctcagcccgccaagcgctcaacctcgacctcgcctccaacatcctactcatcgacgaggcccacaatctgatcgacacactcctgtcgctccactcgatctcgacgaccgaccgggcgctgcgactcgcgaagggccaggtcgagacgtacctcgtcaagttcctcgggaggttgaagccggtgaacggcgtacggctgcggcaggccgtgcgcgtcctcgatgggctcatcagcgtctgctcgacctttgtctcttcgaacgcgtcggacgagcggctgctcgacgtccactcgctccttttcgagatgggcaactccctcgaccaggtcaacctcctcgagctcgcagcgtggttcggcgagagccggatggccgtcaaagtgagcggctatgctgagaagctgatggacgacgagatccgggcacgtaggtcctcttgtctctctccatctttgcgactcgtcgctcctcccggctcgctgacttgcccaaaaccgccccgctcagaactctcttccgacccctcgcgcgctgcccgactctcctccgcaaaacacgcctcggtcgcctcgttccacaccttcaccgcgctcctccgcgcgctcacctcggccaacaaagacggccgggtgctgatctcgtacgcccccgctcctgcgggggaaactgccgcgagccagtctcagcccggcaggccggcggcgacatctgccactgctggcgtcgctcggccgaagcgcacggtcaaccttaagtacctcctgcttaacccaggcgagatttttcgcgatgttgtcgctgagacgaggagcgtcgtcctcgctggcggaacgatggaacccgtccgtcgttcctctctgtctgcctcatcttattgcagacgtctgacgccctctgccgacgcacacctctcaggtctccgacttccacctccagctcctccctcacctaccccctgcccagctcgcaagcttctcctgcggccacgtcatcccgcctgacaacctactgacgctcgtcgttcccgttgggccgaaaggaggcgagctcgagttcaagtttgctgcgagaggagatgaggggatggtgcatccctctctttaccctttcgccggtcgggaagcaagcggctgactcgatctccaatgacagctcgaggagctcggcgcaacgcttagcaacgcctgcaacctcgttccagacggcgtcgttgttttctttccttcttacgcagtatgttccttctcccgtctttcaggctctccagattacagactgacggactctcgattcactcgctccgccgctcggcagtttctcgaaaaggtcaagacgctctggacgaggaccggcctcctacagaagcttgacgcgaagaagacggtccgtcttcctgaaccgcccttcacttcggcctacacgacctttccttgaggggctgcgagctgacgatggagctcttctctcactcactcgcaggtcttctatgagccccaggcgggcggatcagtcgacgctgtcctggccgactacaccaacgcgatcctcacgcctcactccgcgcccgggcctgcgcccgcctctgcgccccatgccacgttcgctgccgatggcggtccggctcgcccagcgccggcggcgaaaaagaagtcgggcgcgttgctctttgccgtcgtcggcgcgaagctctcggagggcatcaacttttcggatcggctcgcgcgggctgtggtcatggtgcgcgtctttgctcacccccttctcctccacgaaaagggggggggggggggtgccatccgagtcatcgaggctgacgtcgtgctggacgctctctaggtcggcctacccttcccgagtctcgccagcccggagctgaaggagcgcatgcgctacgtcgaagaggtcgcgctcgccaaccgccggccggatgctaagaacgccgggcgagagcgtgcgtctctctctctctctttaccccttcgtccgcctgcatagaggacgtcgctgacgcaagagtcctgcgcgtatcgacagtgtacatgaacctgtgcatgaaagccgtcaatcaatcgatcggccgggcgatccgccatgccaacgactatgctgtcttgtgcgtcacccctgcctatcggccgcatcaaagcagaagcgctgaccgccttccctggtccacaaggatccttatcgacaaacgctatgcccagccctcgatccagaacaagctgcccaagtggatcatgggcaccgacgcaaaggacggccagggccgggtcgtcgtctgcaagacgtttggcgagggcgtcaaagggctcgccggcttcttccgggcgaagcgcgtggggagcgtctaaatgcgaggggtggatacatgactggatcgcccttgctttctcaggagctttgcggtgctagagcgccctgggccaggtgcgcctggggtcagtcgatcggccgtacgcatcgggttggattcgagcgaagggacgcgcaggcgccacgtcgtcgtcgttgcctcctgcctctcgacctcgtcctccttctccttgtcaacgacgaccttccacgacgactgccggcccgaacacaaccctctcgccaccttctgagctccagctcgcctctgccgccctgccagctctagatcctagacgccgctacctcaagcagcccacctcgctcgagcttcacgagctcgtcgacgtccctctccctccgcctctcaccctctcgctcaaggggcctccttaggctttagaagcgccatgcccgacaaggtcgagctctacgtctacggttcgtcctcgcgatcaggccaccaccgaatggtcagcagaggcatgctgactgacgctctgcgccccgcccccgcccctgcgcacagacctctccaacggcctcgccaagtcgctctcgctcccactcaccggcattcagatcgatggcatctaccacacctcgatcgtcctccgcgggaccgagacctactacggccagggcatcctccggacgaaacctgcaggctcgacgcaccacggcaagccgcttcaggttatcgacctgggcgagacggagctcgacgaggagacgttcgaggagtacctcgacgagctcaggggtcactaccgggcggacaaggtgcgagcatggctcgcaggatggagaacactgcgcgagcgtcggctgacctaaacggttctctgcttgctttagtaccacttgctcggtacgtctcgatgtcgcctgccgggcgcaccgtgcctgcagacatacacgctaacggccatcctcgcctcgcctcccgcccgagccagacttcaacgtaagcctcggcgctgcgaaatgtgtcgaggaggacgctagctgacctttacttgtcttgtccgatcgcagtgcaactctttcaccgccgacgtcgccgccttcttgacgggcgcaacgattcccgaatggatctcgagtgcgtcgtaaccaagaatgcgccccgctccgagtgttgctgacccactttatgccccttccagacctccccgcccaattcctctcgacgcccttcggccagtcgctccgcccgcacatcgacgcaatgttcagcccagcgggttcagctgcggccggcgctggcctgtcgggtccgcctgccaacgctctctccaacaacgacattgcgtcgacgcttctctcgcacgtcgccgccgccgcctcgtcgcagcagcagccggccgctcgctcgacgccagcagcagcagcccgcgacggcacgctctcgtctacgctccaccttgctacgtcgccgacatccctccacgagctcctcgacacgcacgaggtcgtcatcaccaacttcaccgcgcccaagacgtgcgcaccctgccgcgcgattgcgccgacgttcgaaacactcgcgtcgcttcggtcggccgagctcgccggaaatgcggtcgcgttcgtcgaggttgacctcggcatcggccgcgggagcgaagccgcgcaagagtggggcgtccgcgcaacacctacatttgtcttcttccacaaggggcgcaagacggacgagctcaagggagcgaatggccgcgagcttgaggcggccgtcgaccgctggctctggcaggcgttcccgcctcacccgcacgagtcactgccgctgccagcgatcaaagccgttccgacgacgccgatccttttcaccgcccagccgaactacacagcactgctcgtcaagctcctgcccgcgcttgagggcgcatcggctcctccggccgacgagcgggccatgatccagcggttcgtcgagaacgaggtcgtgcccttcctccagacgaaggcgctttccagcggatgctcgctcgaccgactcatctcgacctgggcggcctacactgggcgcctccaggctcagctcgggcctgagcagatctttccgctttacgacctctggcgggtcgcgctacttgactcaaaggtctcctcgctcgtagcgatgccgcaaagcgctgctggaggaggtcgactgctcctggcgctctttatcgacctgtttgcgctgccgtcggatgcgccgcgcgcctacgtcctcacggtccttcgactcgtcgccaactgcttctcgtcgctgggcctcgcgaccatcctcgtcacgccttcctccccttcacgaacggccttcacaacgcttttggtcgaccatctcctctcaaccgatgaaagcatcaagagcgcggccgctgccatcgccttcaacgtcgcctcggtccgacatcgcatggcgactggccggctcgcaacggctgtcgaggccggcggcgaggacgaggccgactggacgcttgagatcgtctttgccatcctcgaagcgatcaagattgaggaccgcaaggaagacatcctccaccggctcgtctcggctctcggcctcatcctcctaaagagcccgcacacggccgacctcgcgcccaatctcgaggtgctcggcgcaaaagcaattctcgagagcaagctcgcgctggtcacaaggaaggacatccgcgcgctcgtcgtcgaggtcgccggccagctgagttgatgagtcatggcgctgcccatcgcacgtatacgtcagcccgccgtccttcgggcttctgaacgccactcgccgaggcggcagcagtcggcgtccgagtttgctcgttctcagcccagcattctgaatcgcgaggcgcgggcgagtgaggcgggcgaggcgtgaagccggacgcaaaaaggggccagccgtcgagtctcggctttggccgtgtctcaccttgacggctcaacgcctcgtcggccttgtcgccttgtcttccggaacgctatctctgatgctggcacgggatcccgatcgttggttggcgtcgtcgaagctacgccagagcaggcgggacggcttcgtgctgccgcggaccctccgaccaccaccttgcctctccctgaacctcaacgccttcgccctagcacgactagcgatgtcaaccgaggccgcggccgaggctgcggtcctgtcctccgccaccccttggataggctgcattgttatcaggtgtgtcggtgcgaggcgaacgattgctgcgagcggcgcagctgaaagagctgacgagagacctgacccccctcagctgggcagtctggggcgcgacctttatccagctcgtcacgatgctcggcagctcgagctcgtttgagaatggtggctggcggaagctcgccctttgcatcatcttcggtgcgtcaagtaggtcgagtcttaccgagctcacctgtaggctgacaccacctgcttcgcctcacgcccgacccgcagtactggcgaccgtcgacatgggcatgaacgcacgcgatctcatcaccagcgggtcccctcgcccgtgatgcctatcgagagccgccgagctgactcttttcgccctgcagccctcatcctccactttggcgacgtcgagtacgcgacgacctacacgaagtcgtatttacaatttctcatgccctacaacgagctcgccatcctcctgttctgccagagtgagctctgctggcatctcgggttcatgccagctccatccgctgactcccgtcccctcccccgccagccttcatcatccgccggtgctttgactttgccatctcattctacggcaagatttcgatcctccgacgggtcctcttcgccgcattggcattcttctcggccgtttcgttcgccctcggtgccgtcagcatgcacatcatctgggcggtccaggatctgtacgtgctcatcaaaagtaccccggtccttcggccgggcaaagacggctaacctttggcgcgacttcagagtcgacatccagatggacgcatcggctggcggaacagtcaagtgcggcctgatcatcgctttctcgcataaaataggcgctgacccgtcgataccccctggcctgcaaggttcactgtcctgcaggccggctggctagcgacgtcgctcgcggtcgacgtcgggcttacgcttaccatcacgtacgacctcgtcaaggcgatgcgctttggccgaaacgacgtcggcgttggcggcatcggccagattctgcgtcagctcgcaacgctcgcctgcgtcaacggcgtcgtcgtcgtcgccttccagctgtgctttctcgtcataatcgtacgcgacaacgcggggtgagtgacggtgctcgaacgatgtcgggtgcacccttccgcgctgacacgctcatgccgcttgctgcagctggaacgacggcgcacgcacactcctgcctcagttgcaactgctgtcactcctcaccctcgtcaacctaccccggacgacgctcaggagtcagcgctctacaagctcaagtcgaagagacgctggcgcggcgcaggcgtctgccccgctaccactttacttgccgaccactagcaggcagcacctgacagcccttgagcgagggaggcgcaagctttccccgctgattggaaagtctgctgctcgagacggccgatgtcggcccccagcgacggcggcggctcgaattggcgctgcagtagcgtcaccaacaacatcgatggacgaccaatcgctcgggctgctagagatgctcgatttggcgtgtacgagacatggcccgacgtagatgtcgtgatgttatgtcgttttaaagactagcagggagcgctcgcgagctaagaggctcacgatattgtcgtcgcttgacgtaacgctgcagccgaccacgccctcgacagagctgaagtgcacacgcatcaccttccgagttccaattccttaaacaattgggtagggtagccatccggctgcctaaagggtaatggacaggacgcgaaaagttgaacgtttgggatgggcataagatcgggagctgctgaggcagcaggagttgaaatctgagagggtacaagagcgaaagcggggaggaacgagcacaatcaagcccagtaacctaagaccgacacgtggacggccgagcttgtgcggtcaatgaactgatgagacaatgaatactacgcccaagtccctagcaaagccatcaagccgactccagcgagcagactgccaacggcgtagaggaccttgccagtcggggcgtgaatcatctccttgttaaagatgaactcgtgtgcgagcagctcgacggtcgccgtgtagaggacgatgccggccgagatggcatcgagtacgccgctcgcgatcaatgtcttcgctgcactgccgttgtacgaggcccggacgccgaggccgattgccatgccgactggcgtgacgcacgcatacgagacaccagcgacggctgggacccagctgtacttgtgcggcaggggcaggaaggcgagccgagcgccgagtccgagaccctcgaaggtctggtggaaaatgatgacctttcgaaaccaagtccgtacgattgaggatcagccgtcgagtcgagcgaggcgcgctctcgtttcagcagactcacgatgaagagaatcgtgaacgacgggtcggtcgcgagcgtgaggccgatgaagattgagtggaagacgacgccaaactcgaggatcgcgacgccgaggatctgagcgaggacgtcgccatcgtggtcggcacgctcgagcgcgtgagcgagcgccggctccggatgactgtggccgtggccgtgcccatgcttctcgacgctgctggccgagaggtcgccgccgctgatcgaggccgcctcgatgtcgtcgaccgccggaggcgtccggctcatctcgggcccgtgtgaggcgtgcgacgggccgtcgtgtccatgggcgtcgtacgcactgaagccggcagccttgagcttagccgtgccgatccggaaagcaaagagctcgacgaggaagacggccagaagcgagaccatggctgcgaaaggggaccaatggcgggttagctgatgtcgtcgcgacccgagaatgaatgatgccgcaccgatgccgttggcaaacgggtagtcgccccagccctctgcgaggcactctgacccaagctgctcggctgccggagtgaggagatggatgaaggccgtggcgatcaggacgccgctgccaaagtacctgaaagttgggagggcgtggatcagtctcgattgcgttctgttcgagtccgctgcaagagcggcagaagctccgcaaggccagctttcccttggcggcatcgaaacatgcaggaacatactttgcaaagtcaaagacgtgcttcggcatacgggcgtatcgcttgcccaggatcgggaagaggacgccgcaggcgctcgtgactgttagggccaggtcgtgcgaaggcgggaggacggtcagcgagacagtctcgagcattgaggtagctagagcgaccgacctaggatgatgaagatgccaccgatcctcagtcccatcttagcgtcgcctgtctcggccgcgcaggggctgtcatcgtcgagaaggaaagaagagagcgagtcagctcgagggtgagtgcgacgctactctcgcccggcgacaggcaaaagtcgtcgtcggccaaagccggtcaggccgttgcgccacgcactcttcgataacttcgacgtcggccatggtaaagtgcttgagtgaatcgtgcaagggtcttggcgggccgtggcggttggtcgttgatcgtcggcaaagagactcgtcctccttcctcgccgccgcatgagccgctcgactggtctgccctcgtcgtgagcggaggaagggggacggggcagtcgtgcggcctcgatcgctcgaaataaagctgcagcgcagcggtccttcggacctcccacgcggtacatacatcgcttcctcgtcggtcagcagctctcctggaaaccttgacgcaatgctgatctggatctgactaccacagttgccttggcggaggaatgcttcgtttgctttgagaggcatcttgacacgccggccgctcggttgcttcctcgctcggcagctgcccgagccgctcaccctccttcgcaaccgctctctcgcccgacatcatcacaaattggagcgtgtctgcagtacaaaatgaaaggcaaaaaaacatttacaggccgttgcgaggttcgaactcgcgacgtcaggcgctctctggccgaaaacctgcgccctcaccactaggccaaacgaccgcgcggacggccaggagcacgtgcgcagaatctccgaacaccaagctcagcacggacctcgcgaaagctgccagacgaccgattgcaggctcgcaaactggagcgctgtaggcccgacgcatgctggacggtcgagataggaactcgctctaggccgctgcacttttgagcgaggtcgagcagatcggctggctgacttcaaaagcggcctgtgcgcctcctgcacacgacgcgacctgacgctaggagagtgggagaggcgcatcaaagagggcagtcaacccggcgcctgacgacctgctcgagatcggccctgtcgaggacgcttaaccccagccggtcgaacggagtaccgccgcctgctcggagcgcgtcgagaagctcgccccagcggacgtgtccaccatcgtcctcgtcaccgtcaccatcatcgagggcaaggactgtggccatctcctggagccgtcgccagggtgcggccggccgacggacgttcgtgccgagggcgagtgaactcgtgctgatccaggcggcgacctcacgctcgagatcggcccctccggcggccgtaaatttggaccagccggcgagcaaggcgcgctggacgatgtggttcgagagatggtcgacgactcggcggtagacagccgttagggtcagcgccggcagaagcgaggcgagcaggccgagatggcttgagagcgagagaagggcgggcagcagcgcaggcggaagctcgtgcccgtcgtcatccgcctcgggtgccgtgtcccaacgcctgaggaaacgcagacaacgcttgtcagtatcgagcggcagcagaaattagtgtcaatcaaggacgaaccgcgacaagtgcggcttcagtgctgcctcgacctcgctcgtaatgagcttaaccgtcgcctcctctgcgcgggaggccagccgttggaagcgctcgatgtcggccgagaagagggcgccgccagtggcctcggtcgatgcctggacgacaagcgcaggctgggcttgcctccggaggaccgggtcctgaccgatcgcggcgtttagctggatgaagaactggtgtgttgcagtaggcttcggtgtcagccagggtggttcctcttggtgtggaggacgccggggccgacgtacgacatcgtcgctccaccgctcgacctcgctcagcatgtgttttgacgcgccccagacggcgatcgccttgcgcacagcgtcagggcctttgaggtcgccttccatcgcgagaccggcagcgctcgcatgcccggcgagtgcccccgggacgacacggccgaatgtcgacatggtacgctcgagcggagcgatggctgcgaccaggtgggccgcatacgaactgaggagcggcagctggacgtgcaacagaaaggcgagccgatgggccgggttagggagcggcgagtagcgttctgcgttggcggcaggcgttggtcagtagcagctggcggcttcgaagtcagccggcgaggagacgaacctgtcacttggctgaggagcttggacagcgcccaggcggcccgagttggccgaaggttgtcaaagacgcgctggttcgcgccccggtcgtcgtcttcttcgtcgtcgtcggccccgagctcgtcacgcgggacgatcgaccaggcgttatccgccgagacgatcgtttcaaactcctcccgggcaactgtgaggcgaggtcagtactaactcggcgagtgcatgagaaagtgtgacatacagtcgcgctcgccctcgacccaagcattgaggacgtcgcccatgcggaggatctcgccagttaggccatcccagacacgctttccggccgcaagcgtgcgattcgggcggtagcccttttcgcggacgcggtcgtcaaagagcagcgtctgatggaccgtgtgcgccagcagcgatgggtgagctggcggcaaaaggagtggcagtcgtgcgttgagaagtgagagcggcagcgggaggagctgtgcgatgaactcggactgcaagccagaaggaggcgtcagctcgaaagctcacctgcaaaagctgactagcgaagaggtgaatgtacgagagagtcgatcccgggaaagccgttctcctcgagcaggtcgccgaaccagtcgtcgacggtcgcctcgcagctatgcagaacgtcgagcacgttgccaaatgcccactctggctgttgcggggcacgaaaaggagttggcgttggattagcttcgctcgtagcgagtgcatccgactagctcgcaccttgtcgagccgattggtcggccttgtcgtctcaaagtggaaccgccagcgcagcttgacgggctcgacgagcgcgtggtaggcgtagaggcctctcgtttccccgctctcgggatgcaacgggtgaccctcgtgcaggacgccgcctctgtgaagcaactgtggtcagtgagaacagcaaaggcactgacgcaaagccggcgcaccttagctgaagagtgagcagcgtcttgaaggcgcgctcgaaaaccgctcgctcggacacaggcggtttggccgaggcgagcttgagcggccagccaatggctgctgaagcagcgacgagagcgctggaggaacggtggcactcgcaggtcaggacccttcagctgctgcttcgaaagcgagacggacctttcgttctgactgcggagcttctgccaagtgcggcggacgacgtcgcgagccatgtcgcgcaggccagcgtgtgcgggcaagctctcatgaagccgaccggcaaaggcaagaagcgagccatacgagtcgagtgccctgtcgaggtcggccgatggagcgagcgtcgcctccctgccagtcgcggtgggtctgccgtcagcacctgtcgcccgcgaacaagagcagcacgtatgcaagacaacgcactggagtcggagcagctcctcaagcacgagcagatactcgcgcccgaggcttgcctcgtcgagctggcgaaggagctcgcccagccgttcccgaagcgtcaccttcgcaccggccggcccgagcgaccagcccccgtccgccggcagaggctcgtctgcccgctcctggagcgaagcgagtaggtccgcaagctcgtaccgctcaaacgagagcgtctgagctgattcgagcgagctgctcgtgcgtgcgagcgaggagctgactattcgactcgtcgaggcttggcttgacgcgagctgcaaagcggcaggttggagggggagcacagggcacgtcagctcaggtcaatttgagcagcgagtgaagaagatacatacctcctcatgcagcccgtcgacctccttccggagctgctctagtcggccggtgagctcgtccgatcggccgagggcgtcccaggagccgaacgagccggcgagcgcctgagcggcatgggcgcgcgcgttggcttcggacggcgaagcaaagaggcttgataggccgagcgacattgacgggtgcaacctgggcgatagagggttgtgatgtgcctgtctggttgcgggaggaggcggaaggcagctgatcgcgatgggggagatgtacgcgggttcgaggcgaaggcgcgccttgggcgtcactcgctgccgggccatcggccagacgtacgagccacttctcgagcgcacgtcccgacgagaaggcagacgagaaggcacgctctgacgcagagggatagagctgagaagggtgtagatacaagcaagaggcgcgatggagatgtacggcttggcagatgagacaacgttggaggtcttgctagctaggagatctacagagagcgcgggagaaaagaaggcgtacaagtcaagagatcgtcgagagaaagatgagcgtggggcgatgctggaggggacggcagtacgagacttcacgaccggtcaagggccaaatgcgcccatccgagttcaacctcgacgagcggctcgtcctcgtcatcatcgtcgtccaagtctggacggccagctgccgacgtcgctcgcgaacgctggcgggcgagccgggcagccttgacctcgggggcctctggcggtcggacgaggacgccgacagcgagcaggacgggcgccgcaggtgatgatcggccatcggcggtctcgtccatggcggacgggccaaagaggagctcttgaatgttctcgtccgaaagcgtccagccggcagaggacggattcgacgaaggcacaggtggggtggacaaagcgacagcgggcggcggattgtacgagaggccgaggcgggcgagggcgaagcgtaccgaagacgggggcggtgttgcgagaggcgagaccgctgccggtttgggtttcggctgggccgggacagagacgaatagcggctgacgtagacaaccagtcagtcagagggaaggctgagaaagcagagcgggtccgaacagtagcgagaccagacgcacctgccagtcggcgctcgataacgacgcgcccttctcccagcgagcctcgctcgtcccgccgtcgctgctttcatcgtcgtcgccatccccctcggtctccatcagcctgctctcccagagcagcggcgtccgaccgagcttgacttccttcttcgtgcgccgaccgcccgcaccagcgggcctatgggccggctgtgccggcgcgcccatcatcgtcaggacctcgtgcgggacgcggacgccccgctcgcgcgccatgtcgctgaagcggtgatagtcggccccttcgagcgcagcgtcgtagaggagccggcggaggcggcgccggtggaagacgacccgggccgagagggcgacggtcaggacgacgatagcggctgggtgaggcgacagaaaggctgtcagctgccgatcgagctctagctcatctgcccggcgcaagacgtactgagagtcgcgatgaagctgtacaagtagagccgggacgagttattgcggaccggctgctgctggccctgctggccggaggtgacggccatcgttcggcggcggcgacggcggaggacgatgggaagatgggacggaggagctggttctgaaaggggaggcacaagcgctgctcggaaaaaaacgagtggaagaaggaggctactggtcgccaggcagtccaggtgaaggagagtgtgcgagagaatgagggcctctcttcgtcttgctcgtcttgggggccgggccggctcgagcggctcttggcggggagcgatcgaggcacgcggccactcatcagcgtgcttgttcgcctactcttgagtaccagccaacgacaaccttgcgatcagcgaggcagccctcccactctctggaggagagcgtcctctaatcgcattcacaacgtctcgacggacgacccgatgcggcatccggttcgacggcctcggcggctgcgggctgcacccacgacgatgaacgctggtgatgaacgtgacctcgacgaggccgaccgccgacgaccggcgggagacacagggcgacgacgacgacggcggctggcagggtgcaaggtccgtgtcacatcctggagggacggagacgcgctcattagcggcaacgtctaaggccgtagccggcgccggggccctgtcgaccgacgacagcagcgacgccagctcatcctcaaccgaatcgcccttagacaacgagtgcaacaacgcgcgagctggtccagttgagacagctctacagctgaccgacgatgacgagtcaccccatgatcgacatgagggagacggatcgtcgccctcttcgacacgagcgtcctcacctgacgcgacgccttcgccgacgggctcgactgcgggcaccacgcttgactcgtcgtccacgactgcctccccgtcatctgcgacctcctcggacaggagcggtaccggccgctacagggacgacggcatgagttgggcccgacgcgaggcgagcccccttcaggctctgcccctacacccaccggccgagataacgcagcgtccgctcgacgatgggagctaggcgcagtctgccgtctccaaggctcacatctatcgcccagaacgggccatccagcggcctccgtccagcacgcgtgacctggtcggctttaaccttccgctcgtcggccatcgtacgccggcggcggcgcctcgtcctcctctcgcgagaccctcggcggctcgaagtcgtctggcacgtcgacggcgcgcccaaccgccgcccttgccatgtcgtacttcttaacgacgacatcaaactcggccggaaccgcgtcaatccctctgccaccgccgctgccgctcggccccgcctgacccaaacgcaaggggtgttgcggcgggacgggcgggagcgccttgtcgatcggcagcgtccatttgtcgctcgactccgagcgcgccctagcggccatcgccggtctcgaagccgccatcatggccgccgctgtcggacggacggtcgacaagagcgacgaggaccggcttcgtgccgagattggcgaccggctctcgtccggcggtcgggctgcgtgggctggtcgcgggtagaagggcgcgacgaagggaagttcgagcgcacccttgcagagcatgattgtcggcgggacgcagggcgcgtcgggcgagaagctgagctggaggacgaggtcgaactggaggtggcaatggacgcttgagtcagtgccgctgttgcaagggcgaaagcaggaaggcacaggaagcagacttaccatccggtccccagcgctcgtccggaagctgccggtctcgaccccgcacgcgtcaggcggccagctgcccttgtagcggaggcgcatcggcagctcgagtccctcgatcgacgtcaggcgcgggtcgtccgagaagaggtcgagcttgaccggctcgaagggcagcacgaactgcggggcgataggtgcgcagtttatcctaggtgtcagtagacagctattgaaagagaggcagcacgggcaggacgcactagccgctcccttcccgccgtccagacgtggatggcgccgtcaagcaagccgatcaggaagcgctctcgcgcgaggcgctcttctggtggctcctcggcctccttgcccttgcccttgcgcttccagatccctcgcggcccgtccatgtgaagcgggtgtacgtacgcgaggctgagcttgacagggacaaattctgcgccggtcgggatcggcagcgacggcggggtgatgacaacggcgagccggccgggcttcgcatcgagccgcttcgagagctcgacgtcgagcgtctggcgcagcggctttggcgcctcagccggcgagaggacgacggccgacggtgtgatgcggaagacgacctcttcgcgtgcttccgctccgatcgggtgcgagctcgcgaaccgccggccaaagaacgacttaccgccggggaggacgagcttcacgtcggccgtcgcaacgacggcgtgggcgagcgtcaggacgccgtcgtcgaaggacgctgggccagagacctcgcccgccgcgacgagcgccttcgccttctcctttgcctttgcagcctcggtctcctctgggacggtcgacgtctggaggcccgagccggcgccggtggggagggtgaactgcgcggcgttggagagatggtgacgaacggagcacgagagcgtcagggcgagcgcgagctgcggggggcaggacgggccgcccgccgcacctcaaagggccagcgagcactgaagctgcccggtttggccatgctcgccgtcaaatgggtcgtgccctcggccaggatctcggtcagtcgaggcgagcaatgcttcgccgcgagctcggcgtccttcgacgtgccggcctctgggtcgagcgcaaacgggagttcagcggcctaccgggccggcgccgggagcaaggaggagggactgacgggtagcatcccagccataggcgaccttgatctcgccatcgacacggacctggccggcgctgatgtcgctcagccggtcggccgggaccgcgagctcgagcaggacgacgccgcggagtgcgtcaccgttcgtccagaacggtcggcctggcggcggctcgagctcgacggtgaggacgcaggccgagagcggagccatgcgatccggggagggcgtcaaggtttggtcacagagatgaggagaaaaatggttcgggaagtgttcggcacgagctgaacggcgacggaggcaagctgggctgagatgatggcggtcgtacggatcggagcgaaagccatcgcggggcaataactgacgaccagcctttgcgtcgtcgctttctgcacaggacgacaaccccccatctttcgaacgggaatttcttgccggcgcaggaggtacgagtgtaagtaacagtcaagcgggagcggaccccagaacggcaggcaggcagcctgctggccggtcgagtcttcgtcctccgcgctgacggacgaagcgcctgccgatgctgttggaagcgtcgcgcagctctcctcccaaacagcttgcagcctctccgcaactactcttgtcgtcacgaatctcgattcagagaggaggaggagcacggagagagacggacgctgcggccgccgtcggtggctcaggggctcttggcccaagaggcaggagtcggggcagtcggaccacctccgccgtcgtctccgccgtcgccgtcggcctgctccttttcttcgatccccctttcgctcttgctgaccagctggtccctccccggacgttgacggccggagtagcggctatcagggatatgctggcggcgttcgttacagctggacatacaccgcctcgccgtctgccggccgctggccgctcgccgtccctgcctctgtccgcccgagctttggccgttcgcgccgtcttttattctcccacttcgccgacgtggccgaacgggagtataaggctcgacggccttgacggggggacgaccccgcaagccgtatgctgcagcgctgccgttctacggcctccaccctcgctcgaaagggcctcgtccgcgcgcgcgcgtcggccgggcggtctccggcggccgagccggccggtcttttcccaagctgggcgagccggcagcagccagtagcaggcagcacgctgacgccctcgtgagccaagcaactacccctcgctcccttgctccttccccctgacgcaggcttgaacgctaagcaggaagcaaggaagtcctgcttcgtccgacttcgcgacgacctctcgctctctcgacaacgaccgcaccctctcctccccagctcccaggtccgtcctcccttagctccttcttggcggggccagcgctttcgccgcgggcagctgccgctggcctcgctctcccttgccctgtccgctgcgcctgaccccgttggaagggccctctccagtctgtcccgagcagcagcagcaccgcctgcctcgataccgcctctcttcgcatctggtctgccggcgagcggctcctcctcctcacctccttcctcctcgctctccgggctaagacgacctcgcaaggccgcatgtttggttcgcaaccgcctccggcggcgcctcaatggtcgttgacctcgcagtcgacggccgattccacgccatcgggctcatcggcaccggccgactacggagctcagccggcctatcagcagcagcagcagcagagcggcgaggagcatcagccctggcaccagccgtcgactccctctcctggccagccgcagcgctacgacctttacaccatgccgccgccatcagagcagcgctaccagctcgcgccctcgtcctccgtcggcacctactggcacgctcctccttcgctgccgccaccgacgcaggattacgcctactatccggcagcgccgtccacctcgatcgcctccgcgtacccgccagctctaccccagccctcagcgacggtcggaaactactggcatgctcctccacccccgccgtcgctgggacggccgccattatctccagcgaacgccgtcgcgtcctcgtctcggtcgaagcggacgctcgagcagagtctagccgacgagcaccgggagcggcacggcgagattgccgcccagcacgaggccgagctccgggccttgcgcctccgccaggcccagtggtcgcaccagtctgcgacaggcggccacggcatcctctttggctcgacggccgggccagaggcgggcagcagtgcgtcctcgagcagccagtatcaacctgagccgcctttccatgccgtctggggcgggctttcccagtcggtctaccagccactgcctccgccgagaggcggtccatggtcgcaccttctcccgtcaacagagccttcctacccgacgccgtcttcggcgccagacatccctccgtccagcgacctgcgtcccgatctcggccagcgaggcgcctttgcttcgtcgcttctcctcccgcccaaccagcagaccgcgtacccgacgagtccctcggcggcgcgcgagtatggccggcgatcgacctcgtcgtctgacagcctctcacccaacccgctgccgacgttcaacctcgagccgccgctcgcacatggtttcccgccgaccgctccgagcacgggggacagttcgcgcgcgccacctctgctccaggtgagcgtgtcgggaccctctcgctcgcgctcgccgaggcacggcaaggccgctcggacccatccttcgccatcgccaccgtacgacacgccgcccaagtcgcctcccgctgccaccccagctgcggccgttcagaataagggcgccgccacctcgcgaccgacgaccagtggcaacggcagcaccgggaccgctgccggtccagcagccaagcgcaaacgcagcctctgcccaaacctgcccgtcgcccgctgctccgactgcaacgcggccgtcgcccacctgctcctccgcggcgaggacgaggactttgcggtcgagtgggagggcagctggctctgccatccgtgcatgggcatccggcgcgagaagggtctcggcggtgtcgcaaaggaggcgaccggcagcctccgcaagcgcaagcggtaagttcccggcctcatcccgacccgtgatggtccatcaatgctgacgcagtgtttgcactctggctcgcaacaggaaagcgcaggacctgctcggcctcgtcatctgcgacgtctgcctaaaggtacgctcctcctcctctcgctcggcaaactgtgcatctctgacccgctcctcacccgtaggtcaagggccagggcggtgttattgctctcgatggcaagagccagatccgctttacaactgaggtccgtcgctgcaatttgtcgacccatcctcgcacgccgcgcggctgacgagctctcttgcgtgcaacgtcctcagttcgtctgcgtgccgtgcgacgagaagtacaagcggtgctccgactgcggcggcggaggcggtggtcggatcgggtgcgtctttagcgtccgacgtggctgataagtcgagcctgatttctgtacccttcctttgcagcatcggcaagtggcgctcgaggcagctcttcacgggccagcgcaagacttgctgccttactcgtacgtctgatgcgtattctggatctcatcgcccctctctgaccgcttcgtgcgacgatgcctgcagacacccggatcggcgaggcggctcttagctttggcgtctgggacgtccgcgactttaaaagcctcgctacccgcgaggcgctacttgagaagtgctcggctcgctggcgggaccggacattggcgcggcttgccacacccgaggtgcgccaaccagcctgcttcacaatcccttgagctctcgctgactgccgccgatcctccgctgccaggtcctcgagtcagccgtcggtcctgcccgaacgtacgaggacgtcgaggccgctctcgccggtggctggccgagccgcgaagccatctttgagggcatcgagacgccgatcgagcacgagaagcggcgcttcttcggcctgacttggtgcaagacaaagtcagtgttggtcgtcgcattttgctcaagcgactctcttactgatcgatctgaaggtcgactgtgcccgtcctccaggccgcggcgcaagtacgccgccgacaagagcgagtcgcccaaggacgacaaagcggtgctgatcgagaaggccaaccacgacgatatcatcccgcccgaccacgacctcgtcggtctcttcattggccactggcggatcaacggtctgtcttctcttgcctcttgacacgtctgatgggattgctgacggcctctcggaccggtatcctcccagacggcacgctgctgcttactacctcgctgccattcgagacgagtgatggcgacgatcgcgccgcgacggccgtcggcgagatgtgtgtcaagagtacgtgtgcttccgctcgtctctcaacactttgccccctactgtgctgaccctctcagattcaacacgcagttaccaccgaaatctacgaggaaaaccagcgtcgcctcgccgcgcacgaggccacctcgttcatgggccccccgctgaaacttctgccgcccctcgagcacctctgggttctttgcgatgtgcgtcacctcgcaactcggtaaagcgcctttcagacctctcgggcctgtgatctaacccttgcgtccgtcgcccatcttcacagaaccccgactcgcgcacgcaggagcggatgcgcgaccacctcgtccggcggcgcgacttccatcctctcgaggactacctcaaaatccacccgcacgtcgaccgctccatcttccgcatcacgactacctacatgcccgtctcgggcccttcatggatctttggcggggtgagttgcgtcctcgacctctggtgtcgtcgtccatcgctgacctgagcctctcttcaatttaggaggagatcgaccctgcggccaagaaggaacggcagtgtcagtctgctttctgtcgctcgccgcatgacatcatctcgctgacgaccaccttgcatacccgcttcccctccctcaggtgacattcttgttcgctggctcggccctcagatcgaccagcgatgggtcgaggacctctctaccggaaccgagcccccggtgccggcgctcggttagcctgctcgcacgtccttcatttactgacttccactctcatgctcttcaacacctttctatacctgcatgcccctcttctcaccctctcttgctctccattgccccctctatcttatccaacctagatgtgccctacagccatagatgttcaatccccttgcatttcagcgctggctaaagcggccagcaaggttctctcacacgcagcacagagcaagatatgagacggcaaacgaagtcgatcaaggagccgccgccgacgaccgatcgtcggctggcacaggaagcgaggcaagttcagggagggctagggagtcgataagatcggggtcgctgccgaggtcgcaagttatgaggtcagagggggcgcaagagaggccttccagaaggaaaacttggacgcactaaactccataggttgtcgactggacggcccctgacgggaagctttgcacaaacgcgagctcgtcgtgcaccggcgcagcagaccttgttggcgcgctccccgttcgcgcctcaacaccaccgccgagcagagcgaaggatgaccgacgtcgcatgtgcgagagcgtcggacagcgggtcggcccggtcaccgacgtggcagatcgtcgatgtcccgccggcctggaaagaaagaggtcgccgttgcgcttcttcgtcaacggcggctcaggcgttggcgtacgcgagtgggccgaggtgccgttccgggacacctggggcgacggcgccggtgaagatagcgaaagaaagtgcgtctgcggcgttagaggccgctgcgacgcggtcgtcgtcacccagcaggcgtggccgtagccgatgcgattccgaagcgtcgtccagtcctcctcttctgcaacgacttggttaccgggcgcgtttgggacgccttgtttggcgttgggcagcgcgtcgcttcgtgcgagaggcaaggcttcgaagtcctcctcccgattggcgtacgaaaccacctccaccgtccggcgcacgccccggtcaaaggactcgtcatgttgctgcgcccaccgcgaaggctgcgccttgcccaagctgtcgcctcgaatgagcgtcaagaaaccgattccgacgcctgcccgactgctgccatttgaggtgacagacgatgacgataagcatggcaggccgtgtcgaccgaggccgcctgagcgcgcttttgatcggcgtttagcgcgaccgagaccgaataagttcttgcgctgctcgtcttgttgctggggaaaggcatcgaaactgccatcttccaggacgtgcctggcgaaaaagcgtcaagtcagagacgcgtcagcctcgtcgtctggagggaagtttagctggatcggacgcacctctttcttgtcagctgcgggctcagaatgtgagccacgagcgagtgggcgtagacggcgctcagagtacagcagggcctgcctgagatggaagccgagccctcgagacaaagcgaaagcaacatcaggcaatgcgtgatgatctggcggaggggccacgcggcatcaatgtcagcgggcgctcgccgcgcttttgtcgactagagactcacgacgatgattgagttctgtagcgagacccgccacaagtcgcgtaggatgtcccaagtcctctgagcgttcgggtgcgtcgtcgtcgtacaccgctgatgagaaaagcaggatgcaatatggtcagcgagcttaggttgttgtcaacaacagattgagagggtcgcaccctcgcttccaacacatcgtaggttatcgtacactgcttcaacagacaaagagccaagcaggcggcgttgaagaggatctggaggatcaagaaggctggcttttttggcttgaggacctcgcggatgatgtcagagctgagccggggttcgagacagcccatcagcagctgttgagggcgaaggcttttcggctggacgcactatttggggtattgcagcacgagggcattgccgacgaaaccagcgacaagcgaaataggaaggaggatccttgcagcgaccgtgcagctcttttggatccagttctgcggcccgtgccaaattgaatcgcgaagggcgatcgtcctgctcctgatcacgatttggacagcagcgatgatcacgagacccaggaagctgaggaaggggccgaccggccggcggcggtagttgtcgacgtactgcgcctcgccccagtgccggacgtagactgccgaaggacggattgagttgtcagcggcggtagcagagcgaacaggacgacagcgactgactgttgatgacccggctcactgcggaagcgtcggtcagacagcgaaggcaatgatcaatctcagatgctgttgagcccagggcacgagccgtcgaaagcgcaccattgaccgccgtctggaggctagacaggacgaagacggccgcaaccgcccagacctgccagacgcgctccttcctgagcgtcgtccgaagagcggccgtatattggaggatctgtacctggcgcagcaagagaggtatcggcggggtgtcagtgacatgccgcaccgttagagagcccttgcagagaacggcacggacgacgagactaccgtagaagcaccacctgatcaccaggagcgtgtcagcgggtggttgatcaaggcaatgaatccggcggcaacgacgcacgagaagaaggtatcgagcgagaagaacacgccgccgaacgaaatgacctccctaatggcatgcttcactgtctggtcggccatcctgcccgtcagttggtcgagttccgcaggctgggacgagctgcgtcgcagctgagaggggaatcagatctgggtcgtccgtccggcgaggagtgcgaggtcagatgcttgagctgcaaagagaaggtcgctgaggacgaagaggtgctgggaatgccgaagagggtggagttgctggggcgcaaggcaggcgagcacgcaggatgacggtctctcacgggctgacacgacggcagccgacgagccctgctcggttcgacgtgtgaggcctgcatccgggcaccaggtgagccagaaggcgaggtctgatgggcgactccgggcgagacagccgagcgaggtcggcgcccgtcaaaggcaaaacggggccggccgaggtgtgccgcgatgtcgtcgacccgagctcaccgacagtcgacgatgcagcggcggggacgaaggtggtgacaaggaactagtcagcctgtgcgtcaagggaatggttgaagcaaaagggcgacatcaaggtcgagctgcgatgctgctggtcgtggctcggcggaggagctggccggcggcggcacagcagatccgtcgcagagccgcaggatgcacctcgtcgtgcgggcaaacctcctcctgcacctggccgccgcctatccttaatgtcactgatggcatcactgcacagccagcggaggcaccagtcgctccggcaaaatcagtgtcatgcattgcatctcctcaatcagcccctcagccgttctgccagaacgacgtctttccgtcttgccctttagcctccaaaagcgtcatctcggcgtcggtcagccgaaagccgagggctgaaaggagcgaggcagagaagacaggtcagtctgaagcctgatccaggctcaagagacgaaggttgcccaccttgggcattctgcgcgggccaaccgaaaggaggtcgtcagcggggttgcgaggaatgagtcgcacagatgagccacggcggacctgttcggcctgctcggcattctttgctccacccaggggcaccaagccctttgagaggacccagttgatcgcgatggcactgacgctgacgcctcggtctgtcgcaatcttgcgcatctctgcgacgagggggtcaatctccgccatcgggatgttggagaaccggcggccggacggcgggagattctcagcctgtcgaagggcaggaatgctgtaagttcgggggtgaccagaggggggagggggattggagcctggacgcaccgagtacttgcccgtcagccgaccttgcgccagcgggctgtaggccaggccgacgacgccgagctcgttcatcttgtctatgaggccgttcttgaagggcgactggcggagcaggttgacctcgatctgattggacgcgagcgggacgccgtgcgacgcaagcaagcggtgcatggtaacaacttgatcgagcgagaagttcgagacgccgactgccaagggcggaagcgcagggctgtgcgtcagtacgatctcaccttgggtagaggagcggctctggacgcacctgccttgcagagaccgagcttgacacactcggccagctcgcgagcctggctcgcccagctgtgatagccgatcggcccatgaatctgagcggcaagcagtgagcgtcagttgtgttgtcccaaggcgactactctgaaagcgccgcacctggtagagatcgacgctgtcgactccgagtcgggcaagacttctcttgagcccgctgacgaggccaggcgtgaagaggaacgggttcctcggcgtcggcaagggcagccatttggtcgcgatgacgacctgagcacgctcctcgggcgtgagggtctccatgcaggcgcggatgatgcgttcactaatgtgaaagcgtcattcgtcagcaggctgaaagggttgtcaagatcgtatggacgggtcgcacctctcgccgctgccgtacacctgccgagaagcgatcaagatcagcaactgcgcaaacatgttcaggtcccgcgctgaaagcaacgcgcctcggccgtgtcaaagaagccaccctggcgctcgagcgcgaccttgaaggccttcttgatcttgacgaggtctggcggccgacggtagcgaaaggaggagcatgtcggtcagtgctgcgcctggtgcaagcggtcatctccgctggagaccgaccttcaggcttgtagtcccacagtcccgtgtcgccccaggccccttgcgggtccgaaggcaaagtcagaggatgtcagagagagttcagaaagacagctgacccggcaggcaggcttcacacgtgcctgtggccatcacaggaatcggcacgtcgccgtcgcggccgaagagggcgatgcgcgagccgagcgtcgggacgtgcgtccggttgagcagcgggttgttggtcgggacggatgatgagctgaacatcgtgctgagcgtcctgacggtctgagaagcgaaggaaagaagcggccggcgaaggaaccaggtcgaggacatggacgtaaagagcgcgtcgagcttgagctccgtcttcgccggccgatgtcgaccatgtctgctccgccttcgcagccgccgttcctcccggcacctcttgctcagcagcagcaggcgccagagccgccgctgtcgccagcccagcagcagctcgagtcaacgctcctgagcctcttccagtcgctgacggagctccagacggtcgccggttcggtcgtccctggcagcgaggcccttgtgtcgaacgcggcgtgcgtcctcaagctcgctcttaggccaaagctcggagctgacttgtgccctgcctgactgtcgcagagagcggaccatcgccgacctgtcgaagctcagcttgatgaagccctcgatcgtaggcggcgttcatccgaccgtgctcgagttggtcccgatctcgtcttcaccgcatctcgcttgacgagggattgacgtctcctttggtgtcccctcacgacgctaggctcgtcgagcaggataagaacccgcacgcattcacgcgcgacactcttgagcgggcctcgggcgagaaccagttcgcaaacggcaagctgcaggctctgagcgtgcgtgcttccccgtcatccgcgctgtgctgccgagcgcttgcgtcgcttgttctcactgactttgcgctctgctgtcgcattcgatagtcgtataccgagatgctcgacgctcagctcgaggacgccttcccgcagctcaagggggtcctgcgtccatcaagtgacgtttcgcctgcctcggggcctgctgggagcacgaacggcctagaggcctcgtcggctcacccgccgcagccgccgcagaatggagacgtcaagatgggttgggcaccctaggagttattccgcctccgagggcgctctcttcgttcgagcgagagcctgtccgccacctttcggcagcccttaccagcccgtcttagcgcgactcgacggagattgcgcatgcccagcagtcaattcgcacgctagggacgggcctacgatcaaccttgtcgagtcctcctattaccggcgacatgtactcgcccccgctcgactcagtcccagagcagcacgcccgctcgatccggaggctgtagacggttagggatggcgagtccaaaggccgggccggagccgcgcttgcgaccttcatccatgagtcgaggtcgggtcgacgtcacgactggagatcaatcgccaagcactcgccagtccatcgactggaccttctctctctctctctctctctcttctctctctctctctctctccttctcacccaaccaccatcctctccgccgccctctcaacctcttgcatgccatccgccccgcgcaacctcgccctgctcggcgccggccagctctttctggtggcccgctcgtagcgagcgatctggttgaccatcgcagtcggcctcctcaaccatcttgccttgcggagcgtcggccgtgcagatccccgcgtcacctttgcctcagtttcgagcgtagcctgacctggcagctgacttgggtcgtgcctcgactggcaaggagggaggcaagggaggccgcctacacgactcggccctccatcctcgggcatgccctccgcagccaagcgccggagcgtgcaagagtcgtgctcgctgaccaagccggaacgctcaccgggggattcacaagcggattctgagcgacatctatgcgaggcgtgcgagaacggacgagcggggctgagaagatgaggacttaaggagggggcatgaggggtcgtacggctggagtgagctggcggggttgagatgcgagcgaacccgtgcgccgggcgaagtcgacggggaagatcagacgagcacgggcagggttgtggcggacagagatgatgtgggcatggagcgagcgagagcaagggcgaaatgcggaacgagagctggagatggtcccaaaggcgaggtggagaaggccgagagcgcaagatcggaagcggcgggtgaggacggaggctgagagagcggctagatggtgccgcgcgtcttgtcgatgacgctccgcagctgctcgaggaagatgaagctgaagcggcgccgaaaacttgcgaggcgtcagcgctctgagaaccagggtcgcctctgacagaagggaagacgcacatgaggaccgtgttgggcgcgagccgcatccacgccggcgtccagccgcggaagaggaagcctggaccctcggccttgagcgactgcgttaaaacggtgatggggccctgtagtgtaaacgaagggaggaaaaggttagcctcgagagcggcagggcagacagctggacaaaggcgacacgcacatgaccagcgccggcagaattcatgacgcgcgagcggacaacgtcggcagggcaacagatggctaccgggacgaggcagaaagtcgatcgcagagtcagccagagtagttcctgtgtacacggacgtcgttgcagcacgcactggtcgcgacggtaccggcgccgagcgaggcggccgagtggaggagcaggccgtcctgcatgcctccgcgcgtcatgagctcctgcttgaaccagtcgtacgagacgagctgcgaggcgttcatcaacacggcccggacgaggtttggcccgagcccacggaagagctggctgacgccctcttcacggacgatccggaagaggccgtcaaagcagtggttatagttgagccggtcggccggggccttgccggcgtcagcagtcatacggacgaggatgacgtctggcagatggtgagaggggttgggttagtgacctgtgctgagcgatagcaacctccggggcagcaggaccgaaggacgtaccagcagggtttccggcgatgccgccggcgataccggccgcagacgcggcgccaatcatctgccaggctccaagctggttgttgccggctgaaagagggcacaagatcgtcagccggcgaacgcgctgcgctccgaggcgaggctccggccgcagacgtacacgacttgcggatagcgtccttgaacgcctcgtacgcgccaaagcgggccatcgagtaggtcatctgccggaagatgctcgccgacaggcccgggtagaggccgaggacgcctgcgcgagacgagagcaagatcaggcggtcaggggtccgtgagctgagggccgtgcggccggatcaagctcgagcgactcaccgtccgtctgtaggatgcgcgtgacggtgccgaccatgctcgccttggtcttgctcgtctgcatgcgccttcagaaaacagggcaagggtgttcgacgtaggcgatggcgtcaggttgcgctgacaggcctcggcctggggcgccgcagcgggggggcgtcggccagagacgactcacacgcggagcaggtcgagcgggtgcgtgcagcacgcggccactgaaagcaagcaaagcagagcgtcagtgatcgagtgctgcagatggacaagctcgagaagacgcactcgaggcggcggcgcctgaaagatgacgacggggggggaggagagagtgagtcgggtcagctggccgtgaccggtgcttggcgagggagccgtccgagcacgagctctcgcagcagcaaagatgagacggcgcacctccagtcctgcaagaggcatcaacaggaggtcgagcgtgtggaggtcagctctcagctcgggtgagatgggcaaggggtgcgagccggcgggagaggctcaaggcctgtcggaggctcgacccgacagggcgacgcgacctgccctcccttcagccgagtgaagacgaccgaccagaacgggtacgtcttgacggcctttgccagcttgttatcggacggcgacgacatgcttgcttcaagtggctgcgggctcggaggggggcttgaaagggggtggctgggagagacgacggttcgaggagtggcagcgagccgaaattgcctcgcccaggccgccggcagcccatgccgcagaccgccgaacccatgccggcgggcccatgagtactgcactcaagccacatcatgcagacatcatcatccattactccacgcccattgccgtcgcgatcagtcgcgtcgcctccatgacgagcgcatcctcgtggcggaagccgacgacctggaggccgatcggcaggccggcgctgtgctccgggtcgactgtcataaaatgcagaagagggtcaggacgacgttcaaagggagcaaagcggggtcggcagacgtacactgcgcattgatgcgagcgtcgatggtgttcagcgggacaaagtctgccgcccgcgagtcgagcgtcgagtcgacgaccaggccagtcgggaacgccgtcgccgggtagtcgacaagattcctgaagagcgcatgtagtttatcagctccagccgatcaaaaggtcgtcgcgaaagggctcaccagatgttggtcccgctccagccgagcgtctcgccgagcttgggcgcggtatgtgggccgaccgggcaaaggacgacgtcaacgcccgaggcctgccaatgggcggcgtagctcgcacggaagccgttccgcaagtttgtcatctgaagcaggcgccctggaagtcagcttgtctcgcgcgagcgggcctgacgacgagggaacgtacctcccacagacccggtacgtcgtaagtctccttgtcgccttgagccagcacccattctgagagaggcaagattggttcgcccgagagagctgctaggtctcgcatacgcttgccgccgtcggggaagtaaagtcgatgctgcaaagtagacaggtgcttcaggacccctgcgacgaaggagacgtcgacacccggccccgccggcagagactgacgatgagcgcgttggcctcggcgtgccggaacggctcataaggcacgagctcgacgtcagatctcgagcgaagcgcttccagagcagcgtccatggcccgcctgatcggtggttggggcgtcacgacgccgtcagagacgtagaagccgacgcgcagctttggcggcagcggtctgtgaggtgcccaagggatggggacgagcgctggctcgagaagccaaggcctcgcctgactgataacgtgcataatgaggtcgaggtcgcctgcaggcgtcggttagccagaggccgatgggtcagcaagccagctccttggcatagaggccaacgaccggcgcacggaaggagcgagtcattggaccagcgatacccgtcatgagctcggtcccaagcatcgtgcccctgctccccgagacggggaagcgtgtcgtcgtcggcttgagagtccagaggccgcagtaggcagcagctgtcacgaggtacaagatggagccgcggtcagcactcgtccaggtgtcacttgacgcccttggatgaacggcatcgcaagctaccaccgatgtcgctgccgatctgtcagaccgccagtgagtcagcccttgcccgaggcgccggcacaagtaaaacgcacccctgcagcgctgccgtgcaaggcgatgagagcaccctcccctccagatgatccgccgggggtgttctcgagcgagaacgggttgagtgtcggcccgagatagcaagaggtctcgaggtgcatctgccggcggtggcccctcgaggtcagtgaaagcgccagtcagaggaagcaggagtgcgcacaatcgtctgcggaagtgtcgtcttgcagtaaatcactgtccaggatatcctttcgtcagcttagacctccctgtcaaatcgagttgaaagccaactgaccggcgccggcttcgcgcaggatccgaacggagacgccgtctgcttcggccttcttgccttcgagcgcccaggcaagcacaccagagctcgagacgcggccctcgacgttgatgtgatctttgatactgaagaatcaagacaaggcgatggtcagattcaaggcgagacgacaggagtgagcgcagcagagagcttcgcacgagatgggcacgccgtgcagcgggccaactggtcggccggtcgtacgcaagatctcatcgagctcgatggcacgggccaggcctccctcaaagtcgaagtcggtcaggcagttggtctgcgaccggacgggcaagggaggcggtttgtcagtcgtccatggtgaagcgcagcacagaggtcgacgactgacaagctgctgagctagcacagccctcgcggcgtaggcacgaaagacggcctctgacgtgaagtcgcctgcggcaatttcttgcgcgagcaccgtcaagttcaagctaagaattctccgctctccggccgccgtccggtcgtgagcgaggctgaagacgttccggggcaggggcgatggcaagtcgccgacgacgagtgccgtattgagcttcgcgtcgcgctcggccatcgcccgaccgatgagctcctcgaccggcaatagctggccttcagtcgtagtagatccgttcttcatgctggcttgcgagtcgaaagcgtagatgagatggtggtctgcaggatgaggtcaggtcgaaggcgacgcggctttggccgcggccagccacgcttcctacgggacgcgtacgcgtacgcgacggctacgacttgcccgacactcgcgatcacgatgacaagcattcaaggcccaggctgcctgcagctctcgctgggtagcctgtcagcacctgagaactagcgagcctgaagaggccagaggagcaggggagggccgggcgagcggcggctgcgcacccatctcgctcggccgctgccgagcagcaacggcgcgggccgagctctgcttcgaccttgataccacaacctcgacgctccgctctcgctcccatgacaagctgacccctgctggcgaccttgcatcaggctgctcttgctgaggccgacctcggggtatctggtcgtgtcgtgctcggccgacggcgcccgctcgaaatcaagctttgagcctcctcgggctgtgagactcgccttgtcgccggccccgctcaggccgacgagcaaagccctgggccctcgctgacggcgtctgtccctcctcgaacgccacagcaagcggcgcgggggcctgcaagcattccaggtcgaggggtgcggggagacgaggcgtctcggctcgtttgctggtcgaccggcctgcagggtgcgaaggcagctggcccttgctcgcaccatggcatgcggacagccagcactcatccaccacctaccgaccgcctgttctactttccgctcgtgtagactgtcgaccaactcgagcagactcgcatccacgagccgacagccgctgctcgcctcggctgaaggccgctccctcccgccgcgatgaccgcctcggcagcaaccagcgacgccgtgcgggagagcctcctgtggggcggccgcttcttcttcctcgactcgggcgtcaactggctcgtctggggcatgctctgtgtccgtcccgctgccctctggttgctcgaaacctgcgcgcgcctgcgatgctgacgtcggccgcctgcttctccctgtcaggtgctgatgaccaagtttgtctcgtctcgaaggagaggccaagacgacaaggcctggcaggtaaggccctgttccctggctgtcctcctgcccaagccctaccgtcctgaccgcccttctcgtcgcctcacgcagttctgggcggtcgtcgtcgtcttctcgctgaacagcctaaacgtcgccatcaacctcctccggatgatcaactcaaattcgaaacactttgacgaccgagcctacaaggatgcctaccggcgacggatcgtcgtccccctgagctggttcttcgggctcgcggtcatcgtgctcgtccagctactcgtgctccatcgcctctacgacttctcgcgccgactctcgccgcgcctctcgacgaagaagaagttggccttctctgcacttctctgctttgatctcgcgacggcagtcgtcggcgctctttcctatgccttgtacgtccctcccccgagatttaggcagactctggccgcaagctgaccgccaccgtccccttcttgcagcgccctccagttcccaaagtactcggacattgttcgtgaggttcagcggcccaagatgcccttgttcgtcttcgtgtttcggcagtcgcggcctgtggaccacccatggcttacccttccgctgtctcgcaacaggttcctcgtcctgcagctcatctggagctgcgcctcggtcatcatcgtttgctttcaggccctctttcttcatctcgagatccgctacgcgcgcaagatctctagcgagtcggacctgccgagccgcgagatggcgcaagaggtcctccaccacatgcaccgcggcttcatcgtcaactggtggtgcgtccctcctccatcacccatcgtctcccaggcgtcgctgaaagcaagccgcgctcatcctcgacagcatcgtcgccggcgcccacatcgtttacctcggctcgatgacctcacagccgtctgcgatggccggtcgagcatgcgcgagtatctcgggcctctacgtctttggcctcttgagccagctgatccagccgcgggagactcgcaaccggtgcgttttctatcttgcgagctcccaaaggggagcaaacctgataaacccttcgcttgctgcccgcagtcaacgcctcgaggcgcgtcgcgcgacgtctgtgtacgacagccctcgtgagatgcctgcgcgcaagtcgaaggttggcggcgcgggcgccaagaagaagaagaagccgacccgtgcagcagcgctcggagtcaactatggtggcgtcagcaagacgatccacttgacgtcgtacgtccagcgcgagacggattttgagagcgtcagcgacggccaccggcggccggatgacatcgaatcggtcggcagcagctcatcagacgaaccgctcgagggcgagaacgaccttgcgctccggagcgcgcgcaaggttggccttggccacagcgtctgggtcgagtcggccggtcggagcgggcctcgtcagctgagcgcgaatctgcattggtcgccggtggtcaactcgccatcgccggcggcctctaccttcgaggacgacgccgcctcgcaaaccagccagaatcagcccttgcgggccaagggccgaatcgatcgggccgcggacggtgcgagcctttcgttccgccagcccgcgtcgcttctgcgacaggctcaccggccagcggcgcttgcggcggaacggtccagtcgtggaggtcgcctgtcgttcatcgactcattcccgaccgggccgacgatgacccgcagccacggcgtcttgtgagcgagccctcttctctgacacgcgactagaaagccgacagctgacacgccttactccctcgcagcaatccggacgagatcagtctgtcgttcgccgagatcgacgagctctcttcccatgctttgtagcaccatcttgcacgctgcgtctctccgttgtattgtttctcctgctgccgtggccactgttccccatcgcatgatcagcctcgagcacaaagcactaagccctagcgatatctatacaagaagcagaacaatcctcccaaactgctcacttccggcgcatgacgacgacctccgtctcgtacggataggcaaaccacacgtcgccggcggcggccccttcaggcgtgtcaatccgctccatgccgtcgccctcgtcgagcacgcgctcaagctcggtccggagtgtcgccttttccgcttcaggcaggcgcgagacgtagctctttgaaaaggcccggtcgatcgcgagcgagcgcgagcaaggcagcgtgtagttgagcatggtgtactcgggcggggcaaaggccgaggtgtaagccgaggccttgaacgccgcctcccagagacggagccggtactgaggcgagccggcctcgtgttcctgtcgagggcgacgaaaggttcttcagtctcccgctttcagatgtcgtgacgctcgacgtacctgataggccgctcggagcctgcgcacccacggtgcgccatcctcgcgctccatgttccagataaagatggcgacgccgtcgggcttcagcgcgcgtgcgatggcggccatggcgggcgtgtagttcgggtgcgaccagtgaaacgccctgtcgagagaggtcgatgagaagaccaggcgttaatagcgcctgtgctggcgacgcggccttgacaggcgacagcaaacgtactgagcgatgatgacgcagtcgaccgtcccgtcttcgacctcagtagggaaagcggtgaacgtcccgtcgaggcagcggacggtgacaccgcgctcctttgctccgggcagaacagcttcgtcgaacgcctcgcgcattgacgccgacggctcgagcgccgtcagcctggccaaggggatggtcgggtagccctcgggcggcgccgtgagtagctgagtgaagagaccctgcaaatagtaaagaaaacagagcggtcatcagcttggctctgtcacgactagccggaagatcgttgcgacggagagggacgaacgctgccggcgccatgctcgacgacctcgagcggtctccctcccttgttaatggcagcctgaataagctgcatcgcttcgatcggatagctgggcctatgagtagatcatgggaaggtattgggtcagccgtcttggacgaagcacggctggcggacaagctcttgacagagcgccggcagctgcgcggagcagagcccggcacacctgccagcacggcatagggtagagcatagcaaatgcacctggcagcgtggtacgcttggccgatgttgaagccctgatacagtcgtaccgtcatccgagaatgtaaggtcagtctgactgctgtgccttcgcattgagggaggtgaagatgacctacctcggacgcaacggtatggacgtcagacatggcgcggcgagctagcaagagaatggcggaagggcgactattgaggatgctcgatgtgaaggacgacctggctgctgtgttgacgagaccttttgagggcgtgatgagcatggagggttgggtcgaacgagtcagagagatgggctgggagggctggggtgggacgagagtcggcgacagccgctatacgccgttttaccgtttcgccgcttcggcatagccacttccgcgggcatatgacggacatatgacccttccccgtgcgtcgtcgtcgtcgagtcacaagcgagcaaggctgccactgaagtgctcctcctgtctgacgagaagtcgcgtcgatacaaaatggtccatcctgagattcacggcagatacagaagcgctccgctctggcacctccgcgtgccaatcagccccgacgcgactaaacatccgagttgacgcgcttcttgctgccgaaccaaccccggcgatccttctcggtcatgttgtgtccgtccgaaacgaccttagcgccgcggacgactgagtcgaacggcaagtagcgcggcggccagacgacgaggtagaccgacatagccaggaggaggacgagggcgtcgagcagccagaaccagatctcgttgagccagagcttgccggcatagctgtggtgagagagcaggcaggaaatgacgatcagcgtaagagaggaacgcgaggagggcgagcggaagcacgcacccgtcggcgtactcggcgatacggtagacggatcgcgtctgaggagggagaggcgtcaatttccatcctctcagaaagagcagcagtcgtcacgcacgaggatgccggccgagacgagccactgcgtccagtagaccatcttccagtcgtcgatggagcgcttcgagaagaggccgctgagcgagcggccaaccgtctgctcgcgggcgtagctccatttctccggataccggctccggctgcaggggcggcggacgggaagggctatgtcagtcggtcacgcagaagcgagccgagaccaagggacatacacgcgaaggccaaagacagcgagcaggcacatgaagatgatgaactgagcgagctggatcgagagaccgatcgtcgagagcttcttgccgaggtcgcgggcactcggcttctcgctcgcgttcgtgccgccgccggcgcagatgaggaaaaaggtgataacgtcgccggtgcagaagctgagagggcgggatctgaaggtcagacgctgtagcaaggctgcgtagacaggttttgaggacgcacaggcgaacgacccatttggcggggaggagcaggcacttctcgacccgcaggtggttttgtagcttgtcgagcacaaggtagctgtagtatattgaatctcggtcagcggtggccgagtgctgtgtaggctcagcatgtacgtacgacgtcgcgagaaagaaacacgggcaggcgaggatgatgacctgttgggcgacgaacggcttgatcgtataggggtcaaagtggttggcgagccgggcgccgagaccgccggcgaaggctgcaaaggataaacagacgtgagggcaggtcgtcaatggctgagcttgagcgcatgggagtatcttcggcaagtccaagtagagcgacgcaccgtagaggccgatcaggagcgggatcatgaacttgcggccatggcgggcgtagtctgtgcgtgggatgcgacagagggagacgcagcgcgtgagctttgggcacgagaggaggaaacgattaacaggctacgcacggacggaggcaacaatgccagcgaggccaaaaaggacgatgccgacaacagccggtgccaggccggggatgtagcctccgctacggtgggaggcgaggtcgacggcgcgtcagaaacaaggccttcgcaggacgacgacagctcactcacattggcatgttccggggccgctgcaggacgcgaacagcgcgaccagccagacgcaaggcgaggcagggagcagcacaggtcagccgcagaaggatgacggcagtgacagaagccggtccgtgtttggcgggtcgcgggcagaagggcgcacctgggcagcgaccgggcgggccgccagcaagagctggccggcgccgagcagggcgaggttgcgcggggcggatggcatgcaagaggttgagagggcggcagagaggatggtggttgggtgagaaggagagagagagagagagaaggtccggtcgatggactggcgagtgcttggcgattgatctccagtcgtgacgtcgactcgacctcggctcatggatgaagttcacaaccgcggctccggcccggcctttggactcgccatcccagccggcgactaccagctgtgagaatgagcagacagctcgagcctcgggcgacggggcctgagcttggagcgggcgccggcggtcgcccgggagggcagcatcgtcattcggagggggacggctcggatccgacgcgcgcccgtcgtcgcctcgctcgaacttcagcccgtgtccctcgtcttgatccttaagtcgacgcgttctctcatgcatgctgaagcccctcgcgctatcatctgtgcagacgctgggaaggcgccggccgtgctaggcaggccaggagagaccataccgttgggcctgatgcggcaaagcactcgctttccacgcgtccacaacaagcccacctgcctgccaggccgacgggcgataccggagacagtagtattgatggttcgtcagctcctgttggtcgggatgccttggcgacttcatgcgaagactgcagactgcctccttcagctttgatcagccagaggtatcgagtagcgcttcgagtcgctttgtcagtcagtcagcctcccctgtttcgccctcccatcctgctcgagtccatcctgctcaaccaagtcgctaggttgagacgcaaagtcgtcgtaggataatggtggccacacatgtgtggcctattacagtggtgagacggcgagcgaggcaggtgtgcgaagggtgacagcggaggggggaaccgaaaaagagactcgagaagaagaagtccggagttgatgcgggtgcgaggtcggtcggtcgtgagaggtcgttaaagggtgcagggcaggtcggatggaaggtggcgggcgggacggagcggatttgaaggagggcgggtggacgcccgaatgacgaccggcgtctcctcaagcaggtgtgctgggtctgcaggagaagagaaaaagaccgcaaggtcagcccctgaagcgaacgacgaggaaaagtgaaagcggacgcacgcagactcgagcttcagcttatcaaggttgagcgagccgctggcgtctgcggcggcggcagcagcggccagccgcctgcccttggccgtcgccgccttgaaggcgtcgaggtgccaggcctgcatcgacactggaagaaaagatagtccggaagcaaacggcacacgaggtcagctatctgtctttgcaagacagacaagtagctctggacagcctcagcggaacgaacgagcgtaggcgtcggtcgaacgaggcgaggactgctgggtgaccggatcaggcgcaagcgagtcgagctgtgagtcggagggcgagcaggagccgccgatgccagagtcgggcgaggacgacatgtttgtgagacgaggggtataggccgaggtctgcttattgtaattttgggtgcgagcaggtggctggctggcaggcagtagggccggtgctgtggtgggtgggagggagatgggaaaggaggccaaggttgcagagagggaagcgagccctttaagagcaaactagtcagctttttgcctgctcccctcttctaaacagcggattgtcggagagagtgacgggcgagccacgctccagcaggccgccgagacgggcctgctgggaccaagcaagcggggctgcgcagcaaacgagcagaggccccgctcccttctgcatgatttcggcggccgagaatgcctttgtacggcgggcgccgcgagcagagtagaggcaggctcgccaggaggaggaggtgagggacgaatcgtgcaggcggcctcccttgcctccctccttgtcagtcgaggcacgacccatgacccatgtcagctgccaggtcaggctatgctcgaaaccgagccaaaggtgccgcggggatctgcacggccgacgctccgcaaggtgagttgtttgatgaggccgacgagaatgtccgatggcagccagatcgctcggacgagatcgcggcatgcttgaaggcaggttcgcgattctccttcgcaggtcagccagtgggacgctcagtactgctgcattgcgcgccgagctaggcccggaagagccaggcctctctctgcttcaagtcacctcccacctctcagcatgacgtcgaccgacgtgccctatcacagttgttcatgtctagagcgaacggaggttcgcctttgcccacgcgacgacggccggccagtcgtcgacgcgggtgatcccctgcggcagatcctcatcccgaacgagatcctcctcgtcctcgaggtactcgaggccggccgcacgaacctcagcgtacgacatctgctcgcgctcctttgagctggtcgccgatgaccgcttgttccacgggtaggcgccgaacaggagacacgggatggcagtcgtcgccatgtcgagcgcgttctcgagcgcgtcgtcgatgaggatgctcgcaccaatcttggcgagcacctccgacttcttcagcgggtgcgaggacggagtgacgacggggccggtctcgccgtccgtgtcgagatgggtgctggcgggcgggcgtcagtcagcgggttgcgctctctgaatcaaagccgccagccggacgtacaaggcgccggtaaagtaaagctcgtcgaagacgcctgggaagtgctcgccaagccaccgctggctcgtctctcgggcgtcctcgccccgggcggtgacgacgacaagccggacgccgtcaaatgccttgagcgcggcgaggccctcggccgctccctcgaccggagccgcatttcggtagactccccggctgaacatgtcgcggaccttctggacggtctctgcgaaagggcgggtgacgcggttaacgttgacagctctgtgcagtcaggggcgggcgggcaaggcgacgcaccggcaggagtaccccaacctttgaataaaaaacccggtgattaaatcgacacagtcagcacgggagccaaccttgacaacagaagatcgggcagccaaaggtcgaccaacgagcacgcacctcgattccgccagtagtctgaaagggggagcaggtggcgcaggcaagtcagctctcgacgccggcctatctcggtcggcctaggacgaacggtagtagcggaaatcctccatcacgaggtctgttccgtgcatctcgttgtgcactggaaacaggcggagtcagtgccgagtgcgagcgaggcgtcagcacgacgtcactggcgccgaggccgctcggctcagctggtcaggagcgctactcacacgaggcgaccagatcgttcgtctacgcatgattacaggttcggaggttcggagagcgagcagtcagcctcaggccagcggcgagcgtcctcgagcgatagcggcagcagggcagagggagggcgaacctgagcaaggacgtcgtcgaggtcgcaggcgatcgtcagcgtcgcgggccaggcgtctcccatcgttgcaaagcgaggcgggctagggtctgtcgctgagaggagtgggtatcaagagctgaagcgagggagcagggtgcagcaaaggtcgagggaggtcgtgtcggagggaaggatgctggaaggagcattcgggctgagccgtcgagacgcgcgtcgcgtcaggcgatcgaggcaactgacgcgcatcgacgacgcatgcgacaaggcagcagcagcggcagcagggccgcatccgttcaaccggtctgacgctgaggccctagacggaaggagagcaggccgccattgacatcgccagcgacgaaagggcgggattaaagacgagcgggccaggcgttcgtaacacgaggtatgcgtgaaagtgttctgcgggccattttttagaatgcggtggtgcgatgagagggacaggacgtaaggaggtggagagagtaatgtttaggggagggtggcggggggcccaagagtggaagatgacgtttgagagagaaaaggccaggtcgtagagggcggagcgagaggagtcggggccgagacgtgcgctcaggaggccgcgctgagagacgtgaagagggactgaagatgaagagagggtcggtcggtcagcaaccctacgggcaggaggccgacgagcgaatgtggtcgggcccacagtcgaagggtccggatgagatgatgcgtgtttggatgtccggcgagaggagatggccgtgagggtcgttcgtggagagggagatgatcggtatgctacagctagggctgagcggatcgatgagcgaggtcagccgtccttcttgcgcaggaaggacgagcgccaccgtagcagcacgtacaagaggacaagaagctatgggaacaggagtccgctcctctaggccgaggaggcgacgcagaagaggttgggtccgagcagggcctgaacgtcgggcgcgccgtcgtccttccaacgccgggcggcggtcgcctcgtgccgctgccagaagatctgggcgcgctggagcagcctgggaggagaagggagaggatcgaggccggtcagctggagcagcgaggacgtgaggccgagcgcgagagggaccgactcttgcggtgaaatgtagatcgaccaagaaaggtgaatgaggagctcgcgctccatcgcattcatctcctgcaggcagcaggcggaaggagcagcatcagcatcccgtttgtactaatagcagagagagagagagccgcacctcgagcgaccacggcgtccgacgctcaaaggcgtggttgaggtagctggcttctgtgcagaacttcatcgcaacgagataagccgagaataccacgcggagcgtcgtgtccttgaggcctgagagcgggttgcgatggaaggaggctggcgccgtcagcctcaacccgtagaccaaagggcacgtagcacagagcgggacgtacggccagtcgcggcgaggcctgggtggagcgccttgagccgttcgagcaggataacggttgagatgagtacgcaaagctgggaaaggatcggagaagggtcagggacgaagtgcgagggactggagagccgagagcgacgaaccggatgcggcgtgagcgaggtccagtactggcaggcgggcggatcgacgaagagcagccgtcaatagccgagacgtagaggctgcggacgagatggaggtcgggcgcaccaggatgtaccgctgaaggagctggcggtcgctgttgacttgcctccggccggcgctgccgcctttgcgcgggatgagcagatcgacaacctcggcggccatctctgcggaagcaaacctcgagcgtcagcggtcaaagtcaggcacgctcatgagcagagcggggagaagcggacgaaccacagtcggccgcctcggtcgcaaacgacatgaagtcgtccatctgctcgcggtcgtcgacgacgaggccgcgcgcagcgagctgctccatctcgtccgaatcaaagacgcactcgctcagccgccggcgggacggtgccgggcggtcggtcgagtagtcggcagactgtgacaggcggtcgtcgggcgagaaagcggccggcgacgacaggggtatcgagcggtagagggctgtcggcccgagcgagctcgaggcggtcgagggcggcgtcgggaggacgcagagcgacggccggcggtccatcggcagcggcggcggacagctggcggaccaggcgaaggcgggcatgctggctcgcgaaaggaaggctagatgggaggcgatggtaggggggcccaccgcccgtccgctcatcaggatccagtggcggtttgcgcttctcggcctcctgtcggctggcgcgacctggcttcagatccgcggctaccacgtgacgacctttgtcttctcgctcctcgtctcggccaccgtctcgaccatctactacattgtccgccagaaccaccggcacaccctcccggacgagctctttgtccacctgccgttctcgctttaccacgcttgggcgctcgtcctcgtcgtcctgagcggctttgacgcgtttggcgtcgagaagatgcaccaccacgctggcgtctggaccaaggtctttgtcttcctcgcgctcatgttcctcgagacgtcggctgtcggctgtcagttgcctctttcccctcgcctttttctcgcccgaactttcaactgacccccacccccgccctcctctttccccttttagacgcctggtcctcgcgcgaaggcgacgtcggcggcgcggccgtcatcacctgggccctctgggccatcttctcgcaccagcgcttcccggccttcatccactggtcggctctggcctttgcgatcctcgcgagcctcaacgtcgttaaggcgttcgtgacgacgtggcggtcgtcggctggcgggccgatcgcgctgctgcatgacgaggagcgggcgccgcttgctggctaaggccctccctccctccctcccttgccaagcccctcacacacacacacacatacctcaacggcccttacttcaacccactacgcccctgatctctcctactttcatccccaccgtccataacttcccctttgccagaatacctcgaatctcatagctagctcctcccttgctcctagcccggctccccgcccgatccaatactcatctgtagcccttctttcgacccgaccgaaccgcctctgacgacaaccccccctcgcttcgcgtgaaaagtcacatgcttgcttttacttgaacgatccctctctctcacgtaagggctcgtcggattgaaggctgggtgaaactaaaaggggggggagggggctgcctcgcccgatggcagaggtacagtcatgcatgcagatggacggacggatggacgggactgccagacggacgatcggccctcgttcgggcctgcacgacgcgccgaggctgagcgtttccctccctccctgcctgccttgctcttgggcgtctttcttgtcgcgctcttgacctcgtttgcgcgtcgacccagcgacctggaagggggggggggcgtcgtgtaagagtgagggagaggagaagggagggcaagaggtaaatgtcggctctccattggcagtcggtcggtcggttgatgaatggtcagtcggccggggagtcagcccgaccgaggatgaggataaggatgagaatgaggaccgacccctcaacgtgtcgggtctttctccaccgctcgggcttgcacctcgctcggccgacacccgtccgtcaatcaacggggtcggcgcgctgagaaatttcggccgtgaggccgccagcagcgtcgtcgttgtcgtcggcggcgttctattccttggacggaaacaagggcgcggtcggccggcccgtctacgcgtcgaggtcgacgatccggagaatgtcgaccaggtggctgttgatctcaaagtgacctacgggcgcccccccgaagagagagggcctgtcagcacggtttcgacggtggcagggaagtcagaagcgggggggaggaagagagactgaccgccgacgacgtccgacaagtcgacattctcaacgccggcgagctcaaccgcgctcaagccggcaatgtgcgcgccgtccctcaattcgaccgcatttccaacgacttcgtgaagccggacgacgctcgcgaggacaaagtcccgcttgctccaggcgttgacgagccgtctgcccgttgccctgcgggccgtctgccattggccggtcgaaggcgcagcagggagcgagatgaggatcgccgagtcgacgagctcgagcgcctcttgtggccgggccgactggccgagcgcgagtagcgcgtgaaaggccgtcagggcgccgagcgagtggccgacgaggacgaccggccgggcgccttgcggtcgactgaggaggatctcggcgaggagcggcccagccttgcgcgccttgtcgaccgcccgcatccacgtgttgtcgagcgcggtgccggcccaaccatacaccgtcaagggcagcgcgaccgccgcgaggtaggcgttcaggaccgtcctcttcaggacctcggacccggccttgcggaggatcttggacgtgatgaactcgttaacgtccttgccggtcgaaaacatctgggccgtctcgagccgtgtcgcaaagaggtcgcgcgaccggaggaggagcgcgccttcgtcgccggcctggtcgacgaccgacttggccggctggtcttctggctcttctgggagctcaaaagcatcaaacgccgccacctcgccgcccggttcatgggccgtggtcgggtctgccgtcggcaagcgccggatctcgcccgcgcgaggggcagtcgcgaccgagcgccaggcggcgatgccttcttcggccgactgggtgaggaggcccgggagaccgatgactactgtgagcgagggggggcgcgatgggagtgcagccgctgccggcggctcgttgtcggccgatgaaattagggcctgctcagcgggggcggcggcagtggcgccaggagcgatatcgagcgaatcgagcttgctctcgagcccggtcgtgacggatgccggccggtctgcctcacccttcttcttgcggacggcatacgtcacctcgaccggcttctcacccgcttctgcctccccccggccctcatcctccgccctcaagtcgacaaattcgaactccccgacgccagcccaccgccgcctcacgcgccggcccgcaagtccgccgcccgtcaggccgaagagcgtgccgagcacgacgggcgcggcggcgggcgtcaacaggccgagcgaggcggggagcagggcgaggatcgctggcgcagcgaggccgccggttaggccgagagcgacgcctccgatctggcgtgcgcggccacccgaaagagattgtcaggtaagggtgaacagacgaccgcagtttggtgagcggccggttggatgcaaggaggtgaacgtacgacgatgccagcgcccgttgcgacccacctccccatacttcctccccagccctcctcattcttcttcctcactctttcaacctcctcctttgccctgaccgcctcggcctcagccgttccgcgtcgcaagacgtcgaagagctcggccgcgacgcgcgcttcggaacggacgatcaggcgcgggtcgatggcgaggagcgaggcgagcgtgaagaggcgccggcgggcggtcgacgagtaggcgacgtcgcctgcttgcggggccgtgggcgatgacgctgaggatgtagagggagagacggtggcggttgaggcggcagcggcgggcgggaagacgctcgcgacaatgacggcgtgcaggatcgtctcgtgcgccgcgggtgggatcaacgccgtcatgggttcgatgtcggccggacggaggtgcgaaccggaagggaggctcgacgggtcgaccttgagctgcaggcggagcacggaggcaatgaaaggtcttcagtacgcaagtcttgcgtctttcgcggcggctgagagcagacgtaccgcccggcagagaccctcgagccactgctcgtggcttgccattcggctctctagtgcgctgcaagtttcatctccagcaagctgttgctgccggtcccggtcctgctcgagctggacgacggccacggccgccagcgctacaacctgtgcgacggccggctcgagagcggctgctgctggcggctccgctgctgccgagcgagagccggccgccgctgaagcggagctggcggaggcaataccggggagctttgcggccgtgtccgctgctaccttggatgcgcttgcgaggaggcgcgacatcctgtgtggaggaggagcagaagatgggtcgggtcagagggagagacagcgccggaagaggaggagtgacgttagtcgactgcgccccggcagccgcgagtcggccctggccaactgcatcgctcggccggcgtcctccggctgttggtcctttgccgagccgaccgcctgtctacatcactctcgcagcaacgaacagacgatggacggcaagccctcgacctcggccctcaaggcactcagcagccatgcaggccaagacacatcgcgccagcgagaccgcttcggtggcggcgctcatcaggccggaggctcggtctgtgccccgttctcaccccttgcttgacccctgcctacgagagggcgctcgactgactgacttgtcattacctgccctccttgccgcagagcttccggacgctccccggctcgtcctctcgccagcaacagcaccagcaccagcaggcgttcgacctcgccccgctcggccaagcccttccctcgcctgccgccgttgcccatcagcagcaaggcccttcgccctggcaggcagactaccaccctgctgccgcccatagccagcacatacagccgtcgttcggcccgccaggtggccagggtgcgatggactcacaatgggcgcggaccctccagcagcggggcgagatgcaacagcaggcgggggctggcgcgcagtgggccgagggcttcgcgcagggccaccaccagctacagcagcagcacgcgtcgcccattgggccaatgcacacccactcccagcagcagccctcagcgcagtatgtgcagccctcggcttaccagccgcagcagtttggcggcatgggcctcctcggcgcgggagggttgtacggcgcgcaatcgtttggccagcagcagcagcagccagtcgaggtgggcgcgaaaggcaaagctcgcgcggacgaggcatgggagacggcctttggggcgtttgacgaggcggctccgaagctggccgagacggagccggagggggcaaaggagacgccgattgggtcagaagcgtttgagcggtccgtcccccttccagtccacgcttgtgttgaccaagctctcgacggctgatgcgctcaccttgtcgcctcttacacagcgcctgggccgaagctcacccccagcagaccggctcaagcgtctcgcaggcgccccccgccgacatggcctcgtgggaggctcaattttcgcaatttgccaatggctcggccgggctcgacgacgctgaggcagaggaggcctaccgcgagatgatggccgaccaggccgaggagattgcgcggggcgaggcagaggcagcggaggtgggtctgcaggggagcgtcgacgagcgcgggtggccgagactggggccgtacgctttcggtgggtgccgcttttctcgaccaaagacagagcagggtgaggaggctgaccgtttgagcctgactgcctgcgcgcagagtcaacgaacccttacactcagacgaatcggccggcggccgtcgacccaccgtcgtcgctctccgaccgggcccttttcctcgaagcggccctccaagagcagcagcgcgcggcctcctcgtcgaacccgtcggtcggggcccggctcgccgaggccggctcgtggctcgacctcggtgagacgcagacgcaggacgagaaggagctcgcaggcatgcgcgcgctcgaggctgcccggcaagccttcgagagcgtgctcgctgaaagcgacctcaacgcgcaagaccgggccgaggccgagcgcgggcttgggaggacgctcatctcgctcgccgtcagctacacgaacgaggcgtacgacgaggcagcgtatcagacgctccatcggcatctcgcgctgctccatccggagcagagcaggccgctccctgcgccgccggcaggaggcgcgattgccaacccgtgggagatgcacgccgtcctgaccgaggcgtacctcgacgtcgtccgcgccgagatgggccggggcgcgatcgttcctgagagccagatggcgctcggtctgctaaactacagccagggcgaatttgaccggagcgcagactgctggggggcggccctcactgtccggcctgacgtgcgtggcttctctctctctccctctcggagtgctcctcggtcagagctcgcaagctgacctctctctcccttgaaaggacttcctcctctggaaccgcctgtcggtctcgtcttgcttcctggccgtgcgaggcttccctttgactgacaacgcctcgcctcttgtccaggggtgcgacactcgccaatggcgggaagcccgaggaggccatcgacgcttaccggcacgcgctcgagcttaacccgtccttcacgcgggccgtctataatctcggcgtctcgtgcacgtccaggcggacactgcctgtctgtgttacctgctgacctctttctgatcgccccgttcggcaggcctcaacatcggcatcttcaaagaggcggctgagcacctcctctctgccctgacgctacacgagtcggcctcaagcaccggcggcagcagcagcgaccgtgcggcgcaagccgccggcctgacgaccaaagccgaggcggtcaaccagagcctgaacctctgggcgacgctccggcgggcgctctactcgatggtctgtccggagacgagcccttggatgcagccttgcaagagctgacgacttgtgccctgtcgtccgcttgatgcgttgcaggaccggcccgacctcgcagagaaggccgtcgtcggggctgacctcggcctgttccgggccgactttgacttttgagcggggcgggcgaagaggaggtgaaacggacggatggctggcgtgtacgcgacctgctttgcctcaccttcatacgccgctcgccgctcatcgcagtcagcgcgcacaaaaggggctcacttctaggtttcggtcgaaaaaggggggggggcgtcaagaggagggcggcgagaagaggggtcgctcccccacccctgttcgcacagactgagcagtttcgccggcagccttcgcgccttccatcccgaccagcatctcccctcaccgctattcctccgacagcaatcatcgaacccatgtctgacctccacgagacccgcgtcctcgccggctacaaggtgcgacatgctctctgcctgccggtgcgagcggcggatggatggcaccgggccgtccgtcgtctcgaggcgtcgagcctcctgtcgcccggccccgtcgggccttcatggctggctcgtcccctttagccagctcagcgtacatcaaacgagcaggctcctggagaacactacaccctcatgctaaactcgagactggcttcatttccttgccgttccgtttgtttgctcggcaacccctgtcgcgcttccgtactttccttcctcaccccgcaggccaccttgcacaacagtgcgacctccgaggacgccaaagcccacgccgaggacttccttcgcgagggtgcgaccctttgcctcggttgactgtcgtgcgcatcagctgctgacaatccctcccctcccctttctcgcgcgccgctgccgctcggaccccctttttcctcccatctcatccgcgctctcagccggtgtcgacctcgacgagctcgctccggtcgcctcgtcatcgaaaaagcacacctctggcggcacgcaaatcaagcatgaggcgggtgacgatgaggccgacgacgacgtcgacatggttagcggtggcggcggctcgccgaccaagcataaatcggtcgatgagatgacgccggccgagagggaggaacacacgaagcacgtcctcgccggctataaagcgacgctccacaatgaccgaacgagcgaaaaggcaaaggagcatgcgcgcgagaagattgcagaaatcgaacatgagcacgaggtgcaccggcatcacggtttgttcttccctttttactgtctccatcgtttagttgcgaaagctgacatctgtgttctgtgcgacgtcgacaagtcatcggcggcttcaaggcgcgcatccgtccgacgttgcgacttccaccaactcagggtcagccactgaccgacgtgcttccgccctcaggctacgctccacaacgcccggacgtccaccgaggccaaggcgcacgcgcgcgcgatgctcaaggagatggacgtcgaccccgacactttctgagcttgagcgtagtgagacgatgtccggcctcgacccatgacagccggctcgacctcctcagtctgctcttcgctcgctgccccttttctcgcttcgtctctcgtctcccgcccgacggaccgctcccctgccgtcccgatagttcccaatcatgccgccattttaattgacgattcccattcccgtcctcactcactttggcaggcaagacgaggatgcagcatgggtcgtttctttacaacaaggaaagacgaaggggacaaggagacgaaggaagaggagcgggcgcgggcgatgtagatagagagcggccgggaagggaggggagaagggatcgccgcgttggcgacgcaggaggagcgcaacgctccggcaagacggtcgtgcagacgacggacggcaagaggcagaggacagctcacatcttgagccgcttgccgggcccaccaccaccaccagcgccgccgccaaagctaaagccactgccaccgccacggccgccgccgctgccctctgcaagccgccgcttgcgctcggcatcctccttcatcaggagctcggtcgcgctcatcttgccggctccagtagcaaccgaagactgtgccgctgccgaggacgaggacgaggctttcgaggcggccttgaagacgtttgtcgctggtgcgggccgcttgagggggttgaacgagagcttgacgggcgctttgccggctagaggtgcggctgtcgagctcgagccggtggacgggccggccacggcattgccgtcgccggccgccgccgccgccgtcggcggcgagaccgccttcttcccggccccgaacgagaacgcaagcttgaccttgttgtcggccgccgagccgtcgccgccggtcgtcaccatcggcctcacaagtccctgctcgaccgtcggtcctcctccctcgccttcaacgccctcgccgaccgccgccggcttctcagcctttgcgcgcgcaatctgctcggcgagcatcttgcgctgccgctgctcgtcgtccgtgtcctgccgctccttcttcaggatcgcctcctgccttgccatcgccgccgggctcgagtcaacccagctgatgaaccagcccttctcggtgtcgtcgacgcgggcgaggccctccttgccgaggtgcttgatgaactccgtcagcgtgatccactttgtcgcgttcatgtggatgtggttcttgtcctggatgtactcctggtaaacggcattggcctggacacgctttgtgttgtacctgcggagaaaagcagcgccgccggacgaaatgtcagctgctggacgacgaaggcgcgtaagaggtgaacagggacgcaccgccgggagaggagcgccataaagccgtccatgaactccttgctgaagccgtcgatgtactggtttgtctgctcgccgacgacgagcatctgccgcagatgctaacggggggcaagaggcgagcgagaaagcgtgtcagcttgacggatgcgagcagcccacccgacgagggcgacgggagagcgagaggacgcaccgcctcagtcgcgacatggcacttgaagccattgtcgtcccggcactgcttctcgcacacctggcagtaccagcgcaggcggccgaggccctttgccttggcggcattggcgatcgctttcctggagaggtcggagagaggggagaggggatggtggcgcgcgacggaggaagcaagctgacgggtcagccctctggcacgcggtgtctctctaacatcgtgctagtcgctcggacatacggggttccggcgctggccttgggcatgactgcaacggatgtcgggacgagggtgggcgagagtggaagtgacggtcgggaggaggatcaggatcggctcgcgcgcgcggcttcgtttgaccgaccgcagctccgacgtctcgccttacttgtttcgctcaaaccgacatctctctctttttctcgccagtatggccatcttgagccgacaggctagcaggctgcctctctcggcttcgaccgagcaagagcatggcggccgagggaacggatgctgctgaccgacgctcgccaggcaccaagctacccctttgcgtgccttgccccgcctcccgtcaacagcagcctgtcctggccttctggaccccgggcttccctcagctcacatttaacgacgtctaaaagggcaacgcccgctgccgcctggctacctttccatcaatcaccttctttcaattggtcgtgcccgccgctcgccggcatgcagcgccagcctcaccggccgacccaagtgtgccttcatcgagcggcctgggcggccatccccatctccaaagcggggatcaggcccagcccctctctcgccatcgatcttggcggatcatcgatcgtcccgccggccggcgttcgaactctacctcccgcgggcaaatggcctgctgcaccgactttccgcacgcgcggtaaggaacctcaacgccccttcatctgcctttcgactgccctaggaggggtgcctggcccgctcgggccgacgaagctaccccaaaacacgccaggagcgatgggctctcgctggcgaccgtatcggcggccgacatccgtcgcagcctcctccttcgctcaccctccccgctgctcgggacgaacgaaaggctaaccccgcagactcaccagcttctaatgcccatcccaagtcccaatctgggacgtccctagcctggcttttgggcagcgcagaccccggtcgacgcgttcacagcgcgcggaaaagccgacaggcgcttcgatcgagccttgcccggctcggaagcgtgtggcaggatggccctccccctgcctacatcaggcgggtcgctcggccaaagatcgccttcctcctgaccaccgtcatctcccgctcgtggcttgccctcctatccacccctccaacctaccatccatttgcgaacccctttcgcacctccctccagccctcaatcaacgcaatgtcgaccatctccgcccgcgagccgatcgagacgcttgccgccctcgtccgcggcttccagtacccaaacgtccgtctcccccccccccccctcgctcgccttcgccctctcttctttactttcgctgacgccctcccccccgcctcctcctctcaggcgcacaaggccgccctcgccgccgccgcgcgcaacgcggcgcccgtccgcggcccggcggcccgcgcgcacagccgcattgtctcgtactcgaacgacgtctttgaggcactctttgacgacgagggccgcttcttctttgaggctgactgcttccgagtgcgtctgctccttcctctcctcctctctctctgtcgctcgcgctcggactccactcaagagtcatcgctgacgctcttcccgcgccgccttcttccgccctcccgagatcaggctccagaagctcacctccagcccttcaccgacagcagcattagcagcagcagcagcgcgcgtaagcccctccgccggccacgcaagcagctgatcaagaagcgccgctcgacgacggacgactgcgaccctttcggcctggccgggacgcacgcttcgctcggctggtccgagaagcctgcctttgccgagtcagagtccgccaccagctcttcgccggctcaggagcagcaggaccggcgggtcgtcagcctcagccggcaggagtcgcgcgacagcgtcctctcggctgtgccgtcgctgacggcgtcggacgcgacggacgagtcggaggacgaggctctcgagcttgccgatgacggcgcggaggataaggtgtgtctcttgtctgcttctggcttcctgctcgctctggtgctgaccgagcgatgccattgttgtcgcgcaggctgttgtcattcagcttgatgccgttctcccggctttcgcctcgcccttctcctgtccggccaagccgtcgcccctcacgccgacgcgcactatcgcccctgccgccccggccaagcgcctcctccgtcgctcgacgggcaagagcaagcccctcgccttcttcccccggtccgcccccgtcctacccgcctttgctgcattctccaccccgacgccggccgtcacttcggcgccggccgccagcaacgcttgggacgttctctcgctcccccacatgctccgccgccttctctcggccaaccttcccactctcactcctgccatcagcccctcaaaggcgagcgccagcgcccggccccggatgtcgacgaggcgctcgcaggcgacgctctgccacaagccggtcgagagcatctctgagtacaagctcaagcggccgcgcgtcatcgcgcaccttccgatccgctggtgatctgctgccttccgctccctccccccacgttttgttctcctgtcgttttttagattttggtaatcatggtttcatcatcttgaacaagcagccggggacgtattcacaaaaagagagcaggaagggacggggttcagacgacgacggcctgagcgaaccgagccgaaagagacggagagctctagcgcggcgggtggccacgaccgttagtccaggccgtcgctcgagcggcgtgccgagagtcgtgccggccgccgaacgggccacagtgaggacgccccaagccgccaccaccgctgctgtgagcttctcggccggcgaaactgtggtgcggaccgccaaaggggtgagagctgagtccgtgctcgtgccggcatggtccgccgcacgtgtgggatccgtgacggtgctggccaaagtagcagtcgggacggtccgagggagtcggcgatggtggcggagggaacagaggccaagggccggcggaagcaaggttgacgctgcaggcgtggtgacctccgcgtcgtcctccgcggccgccaccgctgccaaagtcgaaagggtgcgggtggtcgaacgggtgcgggaaggggccgcggtgatggtagcctgggtacgagcctcgaccaggaccttcttcgacacctgagggcagaggcgagaaggcagcaaggtcagcggtcgcgaaagtgatgccgacgggcgagagtcgaaggcaagaaggacacgaaccagagtcggccggcgagtggtgacggtggcgatgcgagcgacgcctgtcgtgcggatgtatcttaaccggcgaggtgttctcgtcgtcgtcggctgagtgaaatgtgaagcggcagtcagtcgacaacgcaatggcgccagcaatcaagtggagggccgtaccggtagctggacgaggcgagcagcggccgtgacggcagagatgtctgtggccgggcccgaagccagcctgaggggagcctccatgcaagccgcgcccaaagctgggcgggccgtggtgatgatggtgccggccgtggaaaccgcgctggccgtcgtgccgccggtcggggctgagggttgttcgcccctcggcgtcgctgatgaggggcgaggctgggctggtatcgttgtccgaagatgaatcgctggtgtcgtcgacgattgtcgccgtctcgtatccggtcgagcaggcgtctcgcgtgacatagcccggcggggcagcaagggatgcggccgagcctgcttggtgcggaggcttgaccggcgccgaggtgtcaagagggaaggctgccatcgtgtcgtgcgaagaccaaacgcgcgagagtcgggtggcgaatcgaggtggccggggtcgaaagagcgccgtcctttatcagtgccgcctggccggccggtcggactgcggacgcaggcgcgcaggctgctggggacgcagtcggccatgcgccagccgggatgctcggcctcaaccggcctcaaccggccttaacaagcgaggcaggccgcggacgcaggctaaaggctggccgggactttgcttgccgaggctcgacgatgggaggccgttaatgttgtccgactgctgctgttgcggatcgagcggccggtcacgagcgcgcgagcagcggccgatcagcgctcacggccgtcgtacctcgcggaggatcccaagcacccgctcgatcagcgagctctccccttcgcccttggtccggtaaagcgagccaagctcgaccctcggtccggcgccggtcggtcggagccgccagagcgtcaggcggctgggggtaaagctgagcgcgagctgggctggatgggtcgtccagagggctggtagcgacggatgaacgaggaggaggtcgagaagccgggcttgaggctgcaagtaggtgagaatgaggcaatacttgatcagcccaaggatggagcagtgggaggagacggccactcagaagacgcacctgacgcagggtcatcacctcaaacttccagtcgtcatcgccgtcaagcatgaggtcgctttcgccccggaccgcctgggcatgcgtatgagccgaaatgtagctgtccagcacggccagctcgtgcaggttgcgctggcaggcaaagaaggcggcgacgttgtgccggccagcggtcgagcttggcgcggtgcgctggaggggagggctgaaggacgagtggaaaggcggtcggatgtcggcgaggtagagcgaatagagggacgtcctcaggtaggattggacgactgtagtccagcaacacgcattgggtcagctgcaaggcgaggagagttgtcgcattgagaggcagggcagcagggctcggcggcacgcaccgtcgcgcaacgttcgcgagacgagcctcgcctcccggacaagccaccagacgaccgcatgctgattggccggatcgcgtcgttgggcagttacgtcgcgtaggatccggacgaggatgtcgtacgggagggcttcgagatgaggccggctcagagggctgacggcggcgtaaggcggaggcggcaggtcggccatcttgcgctgccagcgtctgcgagaactgccagaggctccagtcagcccgggcctgccgcatgctgctgtccaacgacacttacagacagcgagtcaaggtcctgcttgcaggcagggtcgacgacgaagaggccaaagacgggttgaaccctttggcctcggtcgagcctcctcgattcgcgcagcagcgccaggccggcctctcctgtctggcccgctcccgccactcccgcctttctctcgaccacaactcgcacccaggtccggacctataagccatcgtcgcacaccatggccaacccgtttccggtcaaggccactcgtcggcgcatggccccgctctccctgccccgctggtcggcctcgcagcccgccacagcgccattcgcgcctccttcccgccggcctgtctacaccagcccctctcaggcttccgcgctccaggtcgaactcaccgacgacgacgacgacgacgacgatgactgggcgcttccgagcacgctccgggtcgacagcggcgacgatgctggaggatgggccggacggagcaagctcgcaaacggcacgcccggccggcgcgggcagcagcagcagcagcagcgtgagtcgcccggccatctcctcctccctgtcgaaccatggtggacggccggtctcaggagtagggtgaggacccttacagcagaaggtctcgccgattaggctgccttatcgccctgcggggcagagcccacctgctcgtgtcgcatccggggagggggccgagcgcgccgcctgccgcccgcttccggtggcacaagctcctgccggctcgtcgcagctctatcgggcgtctggtcgcagctcaggttctgagagggccctctcggcttgccgtccgctttgacgtcggcctccttgttcaggcgtcgtttggctcttgtgccgcctgcgggacgagcgtcccacgtgccctccacctcgcgcgtcccgccgggcttatctcctctgacaaccctagctacttccacagagccgacaacgacgacgacgacgacgacgccggccaagccgacgcacgaggtccagctgacgtcgcgcacgcaggccgtccgcaagatctttgacctcgccgagggtaggacgatgctcctcggccgggcgagcagctcaaagggcgggccgggcggcttctttgacggcgtgcgtacggcaccgctcgactgcacttgaacccactcggacgaaggccttgtcgctgaccgccggtcccgtctgcttgctctctgtagtggatccggtgcccggtcatgagcaaggcccacgcagagctccgcgtccgcaacggcatcgtacgttgctgtcctgctgttctctctcgctctgaggctgatcttgctgcaccgcgttttgctgtgcaggtctatgtcgtcgacgtcggtcagtcgcatttcagttcgagacgattcggtcagagtgcactgatgactttgacctcgccgccttcctcgcgcaggctcgctccacggcacgcagcttaacggcctcgcgctcgccgaaggtgtcgagaaggccctcaaggacggcgactcgtgcgtgctgcgacgatagactcacatgagtagccctgaccgtcttactctgccgtgcgtgcaggctctcactcggcaagacggtcatcaagtcgggcatccggaccgacgcgctcgtcctcgacatctcaatccagacgatgtcgtgcgtcccagcgcgcgattaccttccgcttaactcgaaattgacgcacctttttgattatctccggcaggtcgcgcatcgtcccgcctctgacaccgcccgcgcccgagaagccactgggatcagccggcgtgtccggctccgagacgagctcgtctgagcctccggctacggtcgacgccgccaagccgatcgcaggcatggacccaatctcgtccgagcacctgcactcgccttcgcacggccggtacggcctgtcacaggcggcggcagagggcgacattgtcgtcaacgagatcctcgatgacgacaacgacgaggtcgaggtcgtgtctgtccggtcggcgtcgcagtcggtcgacagcccacacgcgagtgccagccccgagatcgaggttgtcgaggtcgtcagcccaaagccgacgtccagcgcggccgtcgctgccgtctcggtcatcgagccggacgagccagagcacgccgagcccgcctcattcgagatggcctttttggacatggcatccgatgtcagcgacacggttggccgtctgccgaccgagtcggtcctcgagtcaccctctgagggcgcctccctgctcgcggccgacgacgccgagtctgagctcggccggaccgagcgcgacttccgctcgccccggcctggcctgtcgggcgaggaggacgaaccagcgacgtcgtcctgcatccgccggctgtcgagcccacccgtcgccgaggtcatcgccgcggcatctaccggcgatatcgaggccgacgaaggcaagtcgattgagagcggcaaggagctcgacgccgcctttacagatctcctcgaagatttatcaacgtctgtcgacgagttcatctcgaccatcaacgagttcccgcctccgatggacgacggctcctcggccgtccacgaggacgagtcgcgcgatgcgagcgcgttgcagctcgagccgcagatattctggcgacaggcttcgccctcggaccggcaggcggcgctcagcgcgctccgcatcagtcgcgaccggcggcagcaatcgcagtgctcggcttcaaagttgccgaagccaaaggagccgacgcgggcgtcatcgccgccggtcggaagcccgttctcgcacgcgtcggttgagtcgctcagcgatcttttcccggcagtcgactttgacgcggtcgcggcggacgacgacatgtcaaaccacgcggcctcaggcagctcggtcgacgaagacgagcgcgaggctgtcgaggtgggttcgacagaaccgaagggcggcatcgacctcaagcttaacgacgagatcgagtggccgccgctgccgtctcaaatcaacgatggcgtcgaggtcgtcccggtcgaggacgtcggcatggtgagtcccgttcgaactgcctgctttcgtccactctggaactgagctgacatctagcttccgctctgccctaggtcgcgaccgacggaccgagcccgctgcccgacatgctcggcgccgaatttctcgacgctaagccgtggaacccgtggagcacctccgatgagctcgcgtcgtcgattgggaaccctgcgccgacggccggcatgaagcggcggcgcgaacccgaggacgacggctcttccatgcccgccacaaagactgcgtcggtccaggcgactccgccagagctcgtctctacggccacctcgacagatggcgaggcgaccgagcatgtcgagagcctccagctgaccaacggcttcgctaccgatgcgatcgcgtcgcttgcgccagagtcggctagtctgaccgcagcggccgtcaccatcccgttcgagcgcacctttgccgtccccgaggcggccgtcatccaagcggcggccattcaagccgtccagtcttccggccttgccggcccgatctcagcgtcagtcgcagtcgccactccgaccgccgtctcggccgtcacgatcaccccacgcgaggtcgcgtcccggccgactaagcgggcccggctcggcaccttcatcgccggcgtcctggctggctcggtgctctcaattggcgcgctcgcgagctacggcgccggagagcttgcctgagacctcgcgcgcagccacgcatgcgtacggcgttactctccacttacgagcgaccgatcaggctgctcgcccaaccacctttcacttctcctgctccgctaatcatgcccccgttcgcttgacgcgtctttctccgcccgtccttttccctcccgcccgccaccccttgtagccgatccgacgtgaaatctcctccccttgttgtccagcctgccttcacgaccccccctttcctccgactgttgtagcctccgccgcctgcgtacgccgagatccgatccttttccgacaccaagcgagcggttcgtcaagtcatgaggagagagcgccggaaggagatgacaacaacaggaggtgcgcatgaggggttcaggagagggagggaggtcgtgcgggttggtgctacagtgagttgaggatgaccggccggtccgaggatgggctgacaagaagagtagagaaagaagagtagaaagaaaggcgaaccacgggagctcagccgacaacgccagccggttgcgagcggtgctcggacgggacgatccagccggccttctcctcgtccaagagcgagtcgatgtagttggtcaggcgggcgaacagcggcgaggccgtccactgcagaaggcgagcgagggtcgtcagtcaactggctcgactgatgccaaggacacaaaaggacggacaatgtcggcgtcgccggcaatgcgcgacgagccgtggcagcgctgggcgtggcgccaccagaagatctcccggacgttgacctcgaccgccttgacgccctcaacggcgacccagcggttgcacgagtctgcaaaaggagcgtcaatgcgagtatttgacgcgtggtctcttagccgacaggcagacagattacgcacggcagaggccctcgcggatcgactctttctcgtctggccggttctgggcgcggtcggactggcggaagcggagcggcggcgagaagggcaggcctgtcgtcggcgagatgccgtgagcgtagagcatgtggaagctgcagcggaggcgcaaaatcaggccggtcaaagtcctagaggcgatggagcaggaaggcacgcacttgaactgcgagatcttggtcttgtgccactggtagccagcgccgtcctcgaaacagaccgggcagacgcccatcttgtcgacgccgatgcctttgatccaccgtggcgcgtagaggtcggccggaccctgcgatcgcggctcagagaggcgtgcgctagacgagcgcccgccggtcggtgcagtcggatgcgggagctgcagcggggcggcaaagtcgggccagggcgtccgtgggacgttaactaggggaagaagagcaaggtcagtcgttaaggaggactccttgcttcgagggcggaagtcacgcacagcgacggtaccagagagcatactcggcagcgtacgacaggtcgacgtcggccgggaacgagcgcatctcggccggcgggcccgttaggaccacctcgtcctcttctacttgcagcgggaggatttcgcccggctcggaggacagctcactaaggggcgagctcctccgggacgaccgcatgaccggtcctgggtcaaagatggtcggccccgggctcgaagctgagggcgagagtgaactctccttggatccggtgaagactggcttgagcggcgatgggacggctggagcggccgcgatgcctgccagcgggaccttgcgcgactgaagcttggtgaccgaggtgagcggcatggtcggcgtcgggcagcgacggcgtgtcctccggaggacaggtgcacgtggcggcgtcgggtgccttgagctctcgagtgatgagatggaggacgagtgcgaaagcaggcgcttgcgcggagagcggtcgatctcgtcgctcgacgcctctgcgaccggcgacggaagatcgccggcggtcggcgacgatggcgtcggctgcgggtctggctggaccagtgggacgcggaggcggatgcggagcgaaggcagggtgggcgccggcagggaaggcgagccgttgacggcctggccctcctcctcctccggaagcggcatcgaaggcggcgtgctcgtgagagggggcggcatcgacgatgccaccgcgtcgcgagccagttgaccgcttgccgccggctccgatgatgggctgtcaaggtccgtctcatcttcatcctcctcgtcgctggccatcgcggcggcctcggcaaggagcaggcgccgacgcttgacgccggcgagcgagtagatggtgcaggtctggtcgttgtcgctcggcaaggtcgtcctagtggccgacgtggtcgccgtcggaggcgccgccgccacctggccaccatgaccgacagccggctgctgatacgagatgcggcgcttgaggagtggcgtcggcggctcaaagtatggcggcgtcggcggctgcagtggtgaggaggagccgagaggcccgtctgaattgagccgcgcggcgggtgatggtcgcaggtcggcgaggaattggcccgcatcgtcgagcgtcggcaggaacgactcggccgcgtacgtcgagtcgacaaagggcgagaagaacgggttggaaaggaaggcgggatcgagctgggcgacggccgttgttgactcggccgtgctcgccgatgacgtccggcgtgcgagcgcggcgaccagctgagaggcctggacgggcactttgggctgcaaattggcatcaggaaggacgagcgtcaaccgagagtgacgcctgatcctttgaagcgggcagcaaagcgaggtcgggcgcatatatgcgtccatccatgctgtcaagtgctggagcgacgggcgcaccttcttgctctggacgggctggccgctcttgccgctcgcgccaaagatgcgcttcggctcgatccccttcgtcccactgccgaacggctggcctgcatagcgtggtacaggtggccggcttgcgtatgctggtgccgacagcgcagccgtcgcttcgtacgagccttcccatccgccgccgccgccacggccgccagtcgtccagccgctgccgaagcttccaaagtcaagctgcgagggcgaaggcagtgcaaaggccggcgaggccaggtgccagcgctcaaagctcggcggcgacgtccggccggccggtgaagacgacggcaggcgcgacggcagagggaagagcgcgaggccagccggcgacgacgacgagagcatgacgcgcgcgagatctggaccagagtcagttgttactgccttggttagtcgtgctcgtctctcgcgaccgttgagcggaagctgggagagacagaccagcgccctgtagcagcagcggtgctcgacgattgctcgtgaaggggggaggtacagcagcagggaggacgacggtgctcgctcgagcaggtggcggctccggacccagaatgaaccctgacctaagcccaagcccgcccagaagcgaaatctggccgctctgccggccaaaacaactctgcgctgccgggacgacttttgaccttccaacgacgacggtgcccgcagacgactcccggcctgcttgctcctccagaagggccaacctgtctctcgtattccccctcgttgcgtcttctcgaaggcgcaaagatggcgagttagaaggcgccgtcagaccaacacccagccttgccttgagtccaggacgacacaagggccgcgttccttcggagacgcggaccctcctccagcggtcgcgatggaattaggcggaggcacacctcttctctctgtacgatggcattgtttccccgttctttgctctctgcttccgctctcttcgatggcgcgggtgtgttccgtcggatcggccgagaatagagctgcctgcagtcgaccgacaccgagaggcgcgtcgacaaagtgacgacgggctcactctgacggcatcctccattctcagcgccatgcttgtcctcctcatttcctgtcgctcgaccgtcacctcctctgcgccctagcagcgtcttcccgctttccatttgcgctcgctcgctccagccttgccgccggtcgctctacctttagcctctgcccctcgctcgagatggacacaggcgcttcccacccgatcaacgggcacagcatcgccgctctcgtcgtcctcctggtcgtcaacattgtcgtcgtccggccgctgtcgattcccctgccggccgcagtgtccgactttctccgcaagctggcctaccacgcccgcctcaccgcggacgacggcatcgcaggcacgaccgcgagcaccagcagctccaccagcggcagcaatgccgctccgaggcgaaggcttcgggcccggctcgggcttgtcagtgcgccactcgcgggcgtcctgatccttctggcgagcaagacgatcgacggcacgaccgtccgcaagggcatcgttggggacccggacgggcttgagccgttcgacatcagtgcgtgaccgagagccggctgccgcactgcgcgccgttgccttctgcaatgctgactcctcctcgattcttcagtgctcctcttcatctgcctggtgcgtttccctgtcgctctggcagcacaatacgcagtcgagggaagcgccggctgacgcgccggttgacgcctcggcctccaatcacccaggcctacatcgccgtctcgctcgatgcgaccggcctgctccggtacctcgcctttgtcgtctcgcagaagggcggcacctcgggccgcgtgctgtacggcgccttctgggtcttctttcttctgtttggctcgctcatgggcaacgacgccatcatcctctcgggcacggccgtcctcgtctactttgcaaaggtcgccggcgtaaagccttcggcctgggtctttggccagttctgcgtctgcaacattgcgagcgccgtcctcgtctcgtccaacatcaccaacctcgtcgtcacgagcacgttcaacatcaactttctctcgtacacggcctggatgatccttccttcgcttgcgtcggccgcggccggcttcatcttcctcctctttgtcgagttccgaaacgacgtgccaaatcggctcgagcaggtcgacgtcaacccgcgcgaagcactcgtcgacctcgagggcgccatctttggcagcgccgtcttcctcggcgcgctgatttcactcgtcaccggcagcgcactcgacgccctcggcggcgtctgggaggtcacggtccccgcggccatcctcgtctttgcccgtgacgtctaccatgacctccggcaggatgctcggacgcgggcgcccatccagaacggcgagccggcgtcgagtgaagcgccagacgacctgagcgtggccccgacaagcatcgagctggcccctttgccagccacagcctcgtcgtccacctcggttgcgcctctgcggccgggcgggttggatcggcagctctcgacccggctgccgacggtcaacacgcctacggcttccctgcgcagagtcgccagcagcgagccaagcgagcagcctcagcgcaccaagcggctgtcggtcgagggcatctggcggagctttggctgccggtttgtgacggtcacctatgtcggcgaacggctgccgttcaacctcctggtacgagctctcctcaacttggctcgctgcaggcaccctcacgctaacagcccatcatgcagcccttcagtttctgcatgttcatcctcgtcgacggcgtcgccgccacaggctggacccgcgtcttttcgggctggtaccaagcctggatcaacgtcagcggcctcgccggctgctgctttggcatcggcgtcgtcggcgtcatcctttgcaacgtgcatcgcctttcctgccttgaccttttgccggcctggcgcaaccgcatagctgaaggctgaccccgcgaccgacgctcgtctcagtttatcggtaccaacatcggcatgaccatctttgtcgccgctatcctcaagacgtggcaggagctctactcgccctcggaacggcacctgacggcctcgctctactcgctcgcctttgcggccaacattggcgccgtctcgttcacctttccggccagtctcgccggcttgctctggcgcggcctgctcgtccagaagggcgtccacatccggccggccgagtttctgcgacggaattggcgcgtcctcatcgtctgctcggccgtcgcgagcgccgtcatcctcggcgaggtcgcgatcatgctcccagcctgaaagaccatgtcatgacacatagttgtttcgctcgagcttgagtgcgaacaaagttctccctgtcgccaaaagaaggcgcgttgagaaaagaggaggggcgcgctcgtgcacgccctctcggtgggaggccccggggccgtctgtcaaagtttaactcgtcagcagctggcgccgcgtgtgtttttccgatcggtcgatgcggatgggccggaggtccatcaaaggatgctcgtcgaggctgaggcggcaagaaggtccggggccggtcgaccacgcggcggcgtcatgaaacactggccttgtccccgactaagccccgtgatttgttcgcctcgcccgtcccctttaagctgctgcgccccctcccgccccctcccctcccgggtcgtcgccgggcggctccgctcgtcaaagcagctcaccctcctcaactcaccgctctttccatcacactcgaggccccctctccatctgaacgctccagaacaggcgcctcggacgcgattcttcgcccacctcccaaccaacaccaccttcctcctcgttgccgcctccagaccagctctgaccggccctctcgccatgctgctgggacgacactcgctcctctcgcttctcgccctcctctcagcctttgcctccctggctgctgccactccaaccgaacgagagattcgccatcggccgcctcgtcgccgacatccagcagaagtgcacctctagcggcttcctctcgtctatcctccgcgtgtttgacccgtcgtgcggctcatcagcatcgagctccgaggatgcctccagcatgagggagcccagcatcattacgaccccgctcggcgcagtccgcggcaagggtttgacggacgggtcgagctacgtcttgccctacgcgtcgagcgagcgctggcggctctcgacggtcacccccgcttggagtggcatgtgagacgactcgtctccctttcatcatcgcagcagcatgagctgacgaccgctgtctgcctgtttctaccagcctggacggcaccaaaatgccgccgtcgtgccctcagcccgactcgttcgtcgcgtcgctcgatatgtctgaggactgcctgtacatcgtcgtctaccagcccgccgccgcaagtaggagggagatccgcgacatcccgatcgtcgtctggatccacggcgggtcctttattgctggctcggcctctgcacccggccttgacggcaccaactttgccaacgcaaacggcgtcattgtcgtcgttatccaggtgcgtcggcagccggcgagctcagctgcctcgtcttgactgacacccccgccccaccttttttgaccgcagtatcgtctcggcgttctcgacctcctccctcctgcctcagccccggtcggcaccccaaacctcgcccttgccgacgtcatctacgccttgaccttcacaaagaagatcgcggcaagctttggaggtgacccggatcggatcactgtcgccgggcagagctcgggagcgcaaatgattcgcggccttctcgcgagcccaaaggctgcgggtctcttccagaaggccgtcctccaaagcgacccgatggtgcggctgatgatcgccttgacttggctctttgcgctcgttttgactcgagcacgtctcttccctggtcgcagtctttcggcatgtcaaccctggcgataacgcgcctccttgctagctcattctactcgtccatcgacgcccggaaggcaaggagttgagctttgacgacttgaaggcggtcgactgggctgcgctcaccaccgctcaggctcagttctcgccatctgccttcttgctcgataacgcgatcccggtggccgagccgatcggaccgacggcgagcgactccgacacgttcctgccgtctgacttcaacgtcgctctggccgctggcaagctgccctcatgggcgctctcgatcccgctgcttctaacgacggtcgccgacgagtttgccccggccgacggtcagctcaactcggctccagtgcccgccccctactttgcagtcgagctcaatcagtttatcggcgagacggccaaggtcgaggccattctcaactcgtcggcctatgcgctgggcacgggcgacgacgctgtccgcgatgccctcaacaaagtgcgaccagagcgagcctcgccgacacactttgacagacgttcgctgaccgcaggacgcacgctttacaggtcgggactgagggcttctggacgtgcgccacccgggcggtcgcatcgctcgcagaccgcggcggccgagtctttgtcggcgagttacagcagggcgtggcgtacccagacaacgcagaaatcgcgtactgcgccggcaaggtctgccaccaggacgacctctttctgacgttcggcaccacccccgcgggcggcgagacatctgccagcgaggcgttctcaaacaaaatcgtcagccgctggggcgccttcgccgccaggggcgtgccgaggtacgacgccggtcgtcgacccgcttggagcccgtacgagaccgaggccgacgtctttgcgctcggcggcggtaaggtccagcggacgtgccctgctagcttctggggccagggcgccgctctgcttgattgacagatatactctgcctgaacgtgcgccgggcctggcctcgatcttgtcttcttggacttcgctcctctcatctgtccgctcgaccctctcgcctgctccatctcgttccaacatcggttcatatcgatggcgccgggtcttttacgtcctcgagcgaccactttctccgcggcaggatgtcgtcaagcgcgttcagcctgagcgaatagcgcagacggtggatggcagcgttgccgatcatggccgcgttgtcggtgcagagtgcgagcggcggaaagagaacgcgcaggccagtttcctggccgagcgcaaccaggctacacaggaagaggcgtcagtccaggacagaccggcaagacgaagaaaaacaagcagggacggttgcgcaccgagatcggatgtaggcgttgcaagcgacacctccgctgacgacaaagctcccgatcgccggtgccgcactcgcccgctgcgcgttgagcgctacccgaaccttcttgacgaggatccttgtcacagcatcctggaaggcgcgagcgacggcgatccggtcgttttgcgacagcttggttgcgtcgtgccgcgccttcgactcgctcaacgttgctgcactggctggggccagccgcacgagctcgtgctgcaagcttgcgaggatgccgtcaaagtcgaacgtccggcttgttgttgacggaaacttgaccggctgtaaagggggcagcgacgactcgccaccggcagggttcaaagcggctgtttgctcgagcgcaggacccaggccgaagccgtactcgagcccgagcgacttgcccagtcgatcgaagcaggtccccagcggcagggtgccggtgtcaacgaggatctcgtacgagtcaaaggccgtcgccagaagcagctgcgaatggccgccggagatgagaagcgtcaggaaggggaagtcgggcggtcgagcttccgtcatgaggggcgtgagcgcatggccttgctgcgaaggggaagatgcgttccggtcagccagagagcgcctgaaggaaacacagtcttggaccgaccatgtgattgacgccaatgagaggtttgccggtggctgccgcaagggctccggctgctgatgccgccaccgagagacagccgaacatgctgtgagggaagctgctggcgtcagactagagcaagcgcgacgaggtcagaaagtcacttgacgcaccctgggccttgcgtgaaggcaataccgtcgatgtcggccagccttaagttggcttcggcgagagcacgccggatggccgtcggctgggcgtgcagaacgcgcgcagcagtcggcgaagaggcgaacagagtgtcagtgagcgtccttgcttgcgccagagtcgaataacgtctcggccgagcgcaccatagcctgtatatgcgcgtgctgggcttccttcggctggattccgccatgcagcgctgcaaagtcagcaggggcagaggtcagcctgacggtcaggcgcgtcgcaaccaggtcgctcggccaggccgagatgcaccatgaatctcgtgctgcttgaggacgacgtttgagaggattcggcggttcgagtctacacaggccgcacccgtgtcgtcagcactcgactcgagagcaaggatgcgaaagtagctcggcggcgacagtgcagcggtcggccggcctgagcttgctcggcgaggcgcgggcggaaggagcaacctgcccctcgtcgccggacgcccgatacgagcaagagccagaccccaaattcgagcgagcgagctggtcgacatgtccgtccaacgacgagttggagaggaagtggggcgaggaagccttcggggcggagtcgacgtcgagggggtcggaggcaggaggtcgaggtcgagggcgggctgctgccgatgtccttctcgacaacgatcctcacaaaccagcaaagccaccgtagcaagaacgacgctcatcatccagaagggtcctgtgcgtagcccgctctctggtcctgaccgaggtagatcgagatgttgacgctcttgcccgggcgtgcagcatcaccgccggccaccgcagcagccctcaacgtctcgccctcgccttcggccacggccacgaaggtgatcctggggctcgcctttctctcgaaaagagcgaagttgattgaagccgccccttgcgtcgacgctgttagcattcctatacaccccgttctccgtcgcactcgtgccgctccttctccgctcgcacagcggccatgtcgacgactgcccgtctggtccgagcatctatgacggccctgacgctgtcagcttggcagcctcctcctctggctagctccagcgcctcgctcctggctaggtctcaaaggcattacacgcccgtctctcgtcgtccacggcaaagcccatcgatcctcgacgccgccgcaggcagacacaactctcaccgacctcaagctcacgcaagcgctgagctggctgcgtgagtgttttctcgcctgtctgattagaagatccagcgctgacctctcttccaggtaatccaccgggtcagctgaagaacgactgcctcaaaacgtttctagcggttcggagaaaggaggccgaagccttcgcccgctcggtggttgaagcttcctccagcgtctaagcggctccagacgcttgtcttcaaacacgacgatcgatcgctcttggcttttctcgtcctcgcccgactttatgaagaggtccagggcgataatcgggagctgcttcgagcgcatcaacgacggcctttcgcgtgatccgacgaccctcacactcggcgccggccctcaactccttgaggtgctgaccctcctcgatctactccaaggggctccggcgtacctgcttgacgacgtctatcagcggacgcgagaaaaggtcgtcaccgcccttgaagcctactcgccgccgtagtcctcgccccatgtctatgcctctttgccgagcgtgacgttgtttgagagagcattcggatccttcgcggcagcttagacgcgcgcgtcaaagcgctccctctgcgacagtgcgatcataggtcgaggagaagggtgcagctcgccgtaccctcgacgggtctcagagcacgacccaaccggcgccctcgacgtcccacagccagaagagctccgtcttttcgcctggcccgagcgagccctcccactttgcccggccgccttcggtcgacgtgtcggacggcgacgatgcctgatcatcggcgctcgaccggtcccaactcgcgccgcggggcaggctcggccggacggtaatcttggcgtcggtcgagcgcggaaaggcgaagaggacggcgaggtcgagtgcggtggcacgcgtgttttcgaccgtcatctggaagtgggaggggtgatgagagcgaggtcagcgttaagcagcgaatgagggccagctgggagccggcgcgtcctcacctttcgcacgaacgagacgacctcggtctccttccggacaaagccgcccgccgtcgtcttgaagcgagcctccggcgcgcacgtcacgcgcacggccgggtcgactccgagcgagagcggcagccggccgccagggccgacctcgggcaggcggcccttgccggcgaacgaggcggcgacatagagcgtcgtcgggccggcgaggagtgggaacgccgacgggttggttgtctcggcccggatgaaggccgacgtcgaccgcgttgggacagcaatgtgcttgagcctggcctcggtgacgatccgtgtgatcgatacgcggtgctcttcgccgtccgacgcaatgtcgacgacgccctcgatccgcatgacgatgccgacccgacctgcgctgccgccttcgacgctgacctgccggccgccaaagccgtcgacctcgtcggcgatgtcgacgaccgaggccatcttggccatccgcatgctcgccatcggcggtgccgccgcgtagagcatcgcccctcctcgaggcgcaagcgcgctcggcggtggcggagggatggctgccgtccggaagccgagctcgggcgtcgccggcgttgggatcgtcgttggccggtcaggcgagactgtcgagagcgagagtgtcgcgccggtccagtcttcgccggtgttgttcgaaatgatggccttgtaatcgatctgtgagcagaagagagcgcgacgtgagccccagatgctcggagtgcaggcgactgcgccggacgcacagtcaagggcgacgtggcagaggacgaggcagcgccggagcggacgtcgtaagccggccgccagctggcgccctggatgactgagaagccgaacacgttgatcgacagcggtcagacagccaggattagctaagcagctcgaggtcgacgcacagtacgtcagccgcaggtcaacctctcgcttggcctcggccttctcgcccggctctgcctgcaagatcaccctgatcgctcccaagcccgccggccgaccgcccttcacctctgcctcgcgcttcttctgctcgagcacggcgatcgcccgctgggcttcaacctggcctccgtgcgctttaagcgcgcgcgactcatagagggtgaggaaggtcgcgagatcgtcagcgttgcggtgttgcgggcttagatcccgctggaagcgtgaaagggcgttgtctgcaagaagggtgatgctcaagtcagcgtcggatggctggaccgacgctcgcccgcgacaaaccgacagtgtagaagatctcgagctgcttgcgcaggctgtcaatctctcgctgcaggtctgccagccgggcggacgccgtcgtctccttcatctcggacgaagcaagcatccggggcacgacgtcgactgaggacgacagaagagtgatggcgaggtcagctgctgatgtcgcacctgtagcatggccaccgggcgacgagatgggcgagacagacggatgctgacgccgctgcttgctgcgccgtagccctcgacccggagcgtgtcgcgctcaaagccgtcgggcaggccctcaatttgaaacgtcgtcggttcgccgggctgtcgagagacatcgaaaggagagaccgtagccatggtcagcaacaggccaggagtggcgacgagctccgagggcatgccgaccgacggggaggctgagccggacgaggcgcgtgcactgggcggcgctcgagccagcaaagagcgtgatgtcgccaaccgggtacgaggcggcagagagagcaatcattgcgcaggaggggaaggagcgttcgaggtcgcttggaaggtaggtgggtgtcgagcgagagagcggctcggctcattagagtgaggcttcagaccggtgacctgccggcagccgaggtgcgggaagtcgattgcagtgttcaattaaagcggacgaaattgagtcgagtgtttcactatgatttcgtaagcccggcggcatcggcccgaccgcgggcgcgcgcagtcgccgcgccgagccctccctttggacgctcagccacccgagctcctccgtctctcctactcgacgaccaccgccccctcccctctcgcacctctcccctcccagctccgctctcgtcgtcttccttgctctgctccgtcattatgtccggcaactcgtcactcccgccgtcgaccctctgtcagtcctcactcctcgctcccctcgctcctccccgcttgttcggccgaatcgatcgccccgcctaagaaagcgccgactgctgaagaagattgtcaggctaaccgtcgttgctctcgatggctgctgctttcctatgcagaccccattgtacgtctcccttcttgctctggagaacgatggcgcaacgacggcgatagctcggccggccgaggtcatgccgaagcccgtcaagcacgcgagctcggcggcggggagagaggggcggtggcggcggccgggaccttgagctctcacacagcctggctctcgtgctgagcgcctcgcgacctttgtactgccggggctgctctctgctcgacgagcaagtcagatgaagagggcgacattacaggcggcggacgatcccccgccgagcagctccgagggcatccaaagctgactacgccccgacttcctcccccgcacttggcacccactcctccctcgacgcgatccgaccatctcacctccttttggactccccttggcgccgacgacctctgcacccgactcgaactcctttccaaccggcgctagatcttcgcgctcatctcgctggtcgtcatcaccctctttctcgggttgacgatggccgtccggcagcagaacaagcgtaacaggcgctaccttgccttccttcaggcccactacgacgaggttgagctccagcgggcgcgggacgagattgaacggccgcggccggtcatgtgggagatcgagggcgagacgggcgcgctgaaacgggcgatgtggaatgaggcggcgcatgcggctggcgccagaggggagccgccgatggctgagaagcctcaccaaccgttgacctggagcggcatggtacgtctttactcaagggacggacccgtctcattctgtctgcgcagtcaatctgacgatggtcgaactccgcagtcgcctgcttcggccgtccctctcgctcacccggccaacaagcgtgtcctgccgtcgacatgcccgcccctcgtcctctcgacgctcattcttcagcctcggccgcccagacaccaccatcaccatcaagcgaccggagcctcttcgcctgggttcgccgtcgacgatgacgatgacgacgacgacgacgacgacgacgacgacgacgacgacgacgaagaagatgccaacgaaagcagccatcaccaccaccaccatcaccaccacgccggcgtcgaggtcgaccttggcacggagcgggtcgagctcgagggcgattggcgcaaggtagtcggtcggaatgacctcggcttcgagttctgaagctcgaagcaccgcacatcgtcttgcttgtccttctcactctactctcgcttcgggttgctcgcgtcaccctcttgttgccatccttgctccccgcccaccgggcgcccatttgtccatctcatccgtcctttagataccatcaccactcggctggccctgtgttcagctttccatcccaccctcttcttacctgcttttctcgacttttcccccgggcactcatcctaggatccgttgtaaaactccacctgtctcgccttctcctcgcacacaaaaaagcccactttgcactctagaccatgctccacaccaccggccgacgcttcaggaagcaagtgttggatacagtgacgaggagatgggcggagcagagatcgtagcggaggaagcgtccgatgcaagtgctggtttcggcgccgtctactcgtcgtgcttccagccgaggaagcgctcggccttctcgcagtcaaagaagccgaagcggtcgatgtccttgttgacggggacctgagagtgaggaaagagcatcagcctgagctgtccttggcatgatgacagggagcgacgacgcacgttggggtagtagcgctgggcgagctgggcgttcgagagcttttcatcgcgcgtcttgtacgagacgttcttgggcgagacaatgtagaagacctcgtggccggtcttccagtcgtccttctcgacggtgatgccgagtaggcaggcccgagcgacggccgtcgggtcagagtgcgaccaaaggaccatcttgtcggtctgatcgtcgcgctcgagctcggcgacgggcgcaacctcgtgcatccggaacgaggcgatccgcatgctctcgtagcgccggacaaacgagtcgcactgctgctcgcactcccactttgagagcgaatacgggtcctcggcgtacgtcttgtgcttgtggtcgagcggaaagtagtcgaacgtcgaccagcgcgagaactcgaggccgagcgcgttgaccgacgaggcaaagctgatgcggttgatgccgagctcggcgcacgctcgcagggcaacatagcaacccgagacgttggcattgtggaggtcggctgggagagggtcgatcgaagctgtcagctcagatggcaggcgcaggctccagaccagtagccgacggaccatctggcagcttgccaggcgagggcgtcgcagcgacgtggatcacggcgtcggcgcccttgaacgccttgaccgtcgcatcatagtcggtcccctgcgcagtccggtgctcgccgttgggccctgtctccgacttctcctcggtccggttgatctcgtagacgctgtcggggcggcgggagtcggttagctcatggcgagctctccagagacgggagagaagagcgagagaagagagaagaggatgacggttgaggggagcgaaggaggacgcgtgaagcttgcgagcgtcacatcatcagcttgccgcagcaaaaggtctacgctgagcggcgggcggtacagcaagatggaatcaggaggaggtgatctcactagtgaccgttatccttgctgcaggcggcgaaggaaacaagacaggcgaaggggtagtctggttagcaagagtcgacggattgcgcacccggctcgagctgccggcgccggcgacaagaggcagcggacggaccagtacttgacgacggccctgccgacagatccgcgggctgtgattgcaagtgggcaggagcagtcagcgttgagcgaccgtcaacggagggtggcaaagggccagaagagtaggtcgagctgacgccagccctccctttggagagggccggttggccttgcccaaggctcgagagtgatgggcctcggacacacctccggtgatggcgatcttcatggctgctgtttgtcgggtgtgagtgtctaggatgggcgtgcaagggggtgctggcagttgatggctttgtcggagggacgaaagatggaaggccggccggatgctgccgcccgcccgcccgccgagctgtctccgcgtcatcaccttacgcagcagcccaagccctcgcagcccctccgagttttcactctcgcgtcctgatccagacggtccgtaggctgaatatagaaggtatgcattttatggctacagaagacgcgccgtgcggccgcccacgtctgcagcttgaagccgaagggacgtccctcgacgtcggccggtctccgccgagccacacctactgttcgtccggcacggcatgctcgagctcgcgaagccggcgcgacataatttgcaggtagctcgtcttgagctcggtgtcggacccaaatatgtcgatgggctgagggggcgacgaggatgaggtcagttcgccgggacggggtgggaagaagagagcggcagcacgcactaggtccatccgctcgagcttgccgagcgccgggtgaagctcctcgctcacgcgctcccagagctcgcgcaggcctccaagcccaccaccgctcgccgtccggtcgcggccgtcggcctggctgaagcggagcgagaccgactgaggcgggatcgtcgtccagttggcggccggtccgtcctgaagggcctcgctgatgaagaacaggaggtgccgccaaagcaggagcaggagcgtttcaatgatgactgcgggggcgggatgagggtcggtgtcagcggcgggaagcgcaggcttgagcaggcaagggacgactaactcagcgacgactcggaccggcgctgcagcgaccgctgcgtctttctgagagaccgcagggcgagccgctggctctcgaccgggcttaacctcgccggcaggctaccctctggccctgccgctccgccgtcgtcagcaaggacggcctcctcgatctcgtcggccgtcagcagcttcggctgggcgagcttgtccgagacggccgcaaagtggtcaaccgtcgaccggaggtatgtcaccgtctcgtatagcaagacgacggccgagatgatggacggccctccccctgagaagcccagagcgagcgtcagcttgcggtgatgcggtaagacggcacacgagcggaacgcaccctttggcaggaggcccgtctcgcgagtcgaaaccgacggcgtgaagaccggccggagcggggcggcgccacgcgtctcggtcgccagaacaaagtatgacaggaggctcgcgttgaggttctcgacagcaatgtcggtgttgaagtcgaacaggctgccgttttgcttgccgtctgcagaggtggcgaaagcgagggcatcagctctgagacgcgaggatcgaggaggcaaggtcgaagcagacgggacgtactcggcgcaggacgctcagtgtctgcccgctcggcgtcgttaagtggcacgatcaagtcctcccacttctcgcggaggaagaagcggctggcgagagacagcagcgcgttgtggtacgcgccgaagccggaggacagaccctgcgcatggtcagacagaccgtgtcagcgaatagattggcggcagcgcagctaagctcgaaaaacgcacgaggtcctgttgctcgaccgtcgggaggacctggataaagatgctcgcgagcaagtggagctccttgacggtcgagagcgggatacgaccgaccgggtcccgcagaaggccgaggaccgtctcccggtgggcgttgaggaagctcagggcctcgatcacggccccgctcgaggtcgggccgaggcttgaggcgacgaccgagacgagctggaggaccggcaggagaatctggtggtagcgctcaaagacgggcggaaggaacgagtcgacgtcgagcatcgcctggtcgagctccggccgatcctcgataaagtagcactgggtaaggacgtcgagcagacgagcgtcgagcagccgctcggcaccggctcgtgactcggcgatccggagaaggagcgccgtcttggcctcatagacgtagaagacgttgagcgactctgccagtggtgaagcgagagtcaggcgtcagcgaagaggagcggcaatcgagttgaaaacgaaaacaagcaggcaacggcactaacccgggtcgggcgccatgacggcgcggaggtcgttctccgagtccttgagcgactggacaaagctctgaaggtagccgttccggtagaggatgccgacaagccggtggctgtggtcgctcgccgaggcggcaaggagcgtctcgagcgcggcgtaggcgaccgtcttccagatctcgctcccatcgagcgcgtcccggcagatgatcggcacgacgcggtccatcgccgagaggaggatcgtaagcgagcccgactctaccgctgtcgctgccgccgccaccgagccctgagggttgacgatctggaggtagttgatgaggacggtgtagaggttaccgcggacgacctgcgtcgtgccggaccgagcgatgccctcgagcacctgcttgagcaggctatgcagcttgtcggtcgggagagccggtccgggcttgccagtctcgccgccagcaagggcggcctcctcgcgaccctggcgaagccgggtgatgagcgagagcacggcctggcagaggagctcggccgccgctggaggccagtcgggcagagcgatgaggtggaaggccgcctggattaggtcaaagagcgctgactcgcgctccccggccgggatgagctcgaacgacttgaataggacgatgtcgagcacgcgctgccacgacacgaggcacgcctgtcgagcatgggcgacctcgcgctggtggttctcggccgcgagcgtcaggaggatgccccgaatctccttctggagtgcctcctgctggccggggccgccgagcgagcctgtcgcctgatgccggcgccgaatggcgtccatcgagccgacgagcgagcggaagtcgtacacctcgcagccggcctcgttcgggacgaggcagctgctgaagtcaaagttggcaaagtaggcgagcttaatgtcgaggtcggggatgtcgtcctgccactggaagtccattgagaggaggatgtcgagcacgcggatcagcggctgctctgccgtgtccatccggttcgagtcggacgcgtcgtcctccttgggaatcgcaaagaggctgtcgacgagcttggccgcatgcagaccggtcgggttgaccgtgtgaagttcgagcgcgacggcgtcgaggatcgacgaccggtagcggaggaacgacgtcagcgctccggccgaggtgttgacggcgtcgccgtccgggtagacgacctggccgagcgcgacagccgcaggcgcagccggggcgaccatcgggaaggccgcgagctggcgggcgctgaactcctcgcgcgtacggaggtagcgcgtcgtcgctggaccggtgagctcgtgcgtgctcagctgatagacgagccgagcgcacttctcggcgagcgccgggttttgcgcgagcagcgtcggctcagcgtactcggcgcggtcaccgccggaggcgtgcgtaccctgccgtaggagctcaaggatgatgtgaaggcacgagaggttggcgccctcggcctgcggatcgtcgattgacaggtcggccgcattcgcattgagcgggaagccgcaaaggaagtgagcgatatttggcccggcagtgccgccagtcgtgttggcgagcagcaggtcgagcacggcgacgcggatcgtctcgatcaggtcctcttcatcgtcggctgaggggcttcgaccagcgtcggcggcgacaagcgcctggaccgggtcgtcggccgcggcccagccgggctcgcccccgccctgagcctcgagacggcggacaaagccgtcgaggatgcggatcgactcgtccgacgagtcgatgacgccgacgagccggttcatgtgcgagctgtagacgttctcaaaccggtcgaccgcgcggaagaagggcgactggctgagctggctgacgatctggactgcgaggagtgcgatctcctgtcgctgaacatagttgacgaggagcgcgatgtcgacgacgacggcgtgcgtgtagagcatatgctggtcgagcggagcgacagccgtcgggaacgcagatgggttgaggccaagggcgccggccgatgcgaccagtgtcgggagaaggacctcgacgaaaaggccctgaattgcgaggacacgatggacgatccgcagcgcgcgcaagacagcctcgaccttggcctgggtttggccgccgtcgtcgaggaggccatcgaggctgaccgaaataacgtcgaagagcgccttcagcgtcgccggctccgtcaggagcttccgcaggacgtcgaagccggggtgggcggcgagcgcaagtagggcaacgccagccttcgagtgagacgagcgagcgcctccgccgccgccgctcgtaacatcgtcgagcaggacggggctgaggtcatacgttgccaggcacttttcgacaaagcacaacgagcgctcaacgagcatccaccgctcgcgctcgttgacgtacgcgagcttcggcgcccggaggaggacgtcgtgcatgacgtagcggacgtagggcgccataccgggggcgcgcgcaccagcgccgaggttctccgggatcgtctgcgcgacgggcccctcgaagccgccaagcagcgttgccggccgggcaggcgtgtggatgagcgtgtcgagcaggttgacgaacgctgccgtcgcagggtacgagccggcctcgacctcggcgtcctcaaactcggcaatgatgcctccagcaccagatccgccgcggctcgacgtcgccgttgagcgatagaggccgccgaacggcgcggccttgacgccagcagggacgagctcgaagcgctcgagcgcgtaccacatctggcgggcaatgtcggcaccgagcgggccgccttcggggccgcagaaggcagcgagggtgtcgaagagcgccgccttgaactggacaggaacgacagagttgacgagcgcgagcagcgtcggcagcgcccggaactgggggctctcgaagagcgtcgcccgggcaacgggcgagaagtggacgacgttcttgagcagccgaaggaaggccgtcaggagcgcgagctcgtccggcgggattgtcgacggcgcgttgggatcccgacgcggggcctggccctggtggctgccgggcaggcccgggacgccggccgactcggccgcctgcgaacgctcgttgatcttgggcagctgctgggcgtagaactggagcgcctcgaagagggccgaccacgagcagacggtcgcaccgacgccgccgtgctcgccgccctcggagcccgaggcgaggaagccaaacgcaaaggtggcacactgttggccgctcgcgagcgaggcgagcatgtcggacaaggcgcggatcatgcccggtgcgcgcgagtcggccgcccaacggaggaaggcaaagagccggccgtcgggccggtcgatccagaacttgagcgccgcgtccggcgggcagtcgctgtagagcgcggcaatcaggctgaagagcgcctcgatgtcggcccgggcgggagcggcggctgcgcccgatgcggcaggcattgctccgccgagcgaacgccggcctgaggccgaaagcgacttgctgccgccgccgctgccgggtgggttgaggagcgcgtcctcctcgcgatgcttgagcttgcggaggatcgggctcatcgtcgtcacgaagctcgcgacgagcaggtcgacagttgcaagcacgtggagcctgaagcggtcgtcgacccggtcgagggcaaggacgacgtgttcgcgcgcaaactggagcgcatcggaccgaatcgaattctggacgaggccctcgacaaactcctccgacatggcgatcgtcgccgagaggttgtcgttgtagcggaaggcggtgacaaggtagagcgtccattggagcgtgatgagcgactgaagcggcttgtgcttccagggcttctcaacctggtcaagagcaagaagtacagtcagcagctgctgcacctccgagcaagcgtcggagggaagacttacaatctcggccgtcatgatcttgatgaactgcgtgtccttgaggaacttttcctggatgatctgcaaggcacgaggaaaggaaaggaagggatcgtcaactcttgtaattgcaaaggaggcggacaaggacgaaagctcacccgctcgtggtcggcgtcctcgctcttgaggtcgctcatctcaaaggcggcgagcagtgccctggaaggagagcagcatggaagtgtcaggctgaccggcgatcttctacctcaatgctcgagggggacgcacgaaatgaagtagccgagcaggagagactcctcttcaaggtcagcctcggcatccgatccggctccagcggccggggcgccgaacgcagccggcgccggggcaggggcagcgacggcagcgccctttgaagactgggatgcagcctggcgagcgagccagcggacagcctgctggagctccttcttgcggagccacccggcctgggcgagcaggtagaggacattgccgagaccctggcgcgtggaccggaccgagttaaggcgctcctggatgatgtcggctgggagcggcttgccaacatcaccccctccctggccagaggcggcagggagcgctgcctgcggcggaggagccggcgcaaacgtgttgaatgcgcctgggtggctcgccggcgtcggcgcggcggcgttggcggcggtcgcagcagcggcgagctgcttgcggaggtcgagcgcggtcgccttgagaagctcgatgtcggccagcagccgctcggcgagcgagccctccttgccgccctcgagagcgacgagcgagccccggagctcctggctgaacgagcggacgacggcggccggctcgcctgcccggtcgcgccaggcccgctcgtcaaacagaagcttgagcagctcgacgagatcgagccgctcgctctcccagagcaagacggccgtctcgcgtgcaggccgagcgaactttgccgtcgaaccaagagctaaccggtggagcgaggccgcgaggagctcagagatgttgagcgtcgccgagagggcgagcgcgtcggcgatgaaggcggccgagagcgggatcgtcttggagccgaccttgagcgagcctgtaaggttgaagggccaccatcgtcagcaggctgtctgcagctaagtcgagtcaattacgtcgagcgcgacgccacgggacgggacgaacccgactcgaccgacttgcgctcttcggcgttgggctcaggcgccttcagtccgcgcaagagccacagccggcagcggtcgagctcggcatagacctccttggccgactggcccgcgtcctcgtcgtcgttcgcgagcaagcgcaggagcgtcgcgaccggccgggagaagaggttctggacgaacgtcgtcggcgcgggcggctgggcggccggcgacgacatcggctagaggaagggaaagggaaaggacgggagacgggtcgacggcgcgcgccgtacgagggtgaatgggagagctgatcgagttaagagactctgactaaaagaaagagacgctcgttgacacgtcgaccgctggtcggacggttcaggcaagcgaagaggggaagggcccagggcgcgcttgagaggcggacgaggggagggctgcgggcgggcggaaagaagcgtgtcagcagtgcagaacgcgtccgtatgaaccggctggccgccgatgagagctgctaggacggacgcgttgaagaagtaccgagatgggtgggtgaagcaggcgagagcaagagcagcagggcatcgacttgggaggaggcgtcgaggcgagaatgcgtcccggtccggcgagctgcattgcgcgccctgctaaaacgcctcggtctgccatcttcgggccgacctctcctcccgtctcccttcgccctcgctgcctcttctacaacctctccttttcccaaatcaagatggccagcctgctcgccctccgccgcccgccggctctctcgcgcacggtgaccgcgccctttgtcgccgttggccggcgcggcatcttcgactacgagcccgtcaagccgctcggcgaccggatcgaccagcccaagtcgtacccgttcgtccttctcgccctcgctgctttgagtagcagaccgcagactcagagcttcggtctgtcgtgctccttcttaagctgacgtcctcacttgtcataaccgcacacctgcccttcgcgcccgctccgaccggtctgatcgctcggccgcgcgcacactcgctcctcgtccattggcccgacctatcgacctcgactctctgtcatctcaatcactgcctgacggacggcctgcagcggcggcaagaagcccaacccgcagctatttggctacccggagctgccgaccgagtacatgcaccgtgcgtcttccgtttcgcctcgaggacagcgcgcgagagcggcctgggggagtaggcagcagctgcccttcatcctcgcccgcctcgctacccctggcaacctcgctgtctttgcgcgagaggcttggaagttttgaccttgagagctgacctcatgacggctttggctcccgacttcctttacagaccgtgacccgcgaggcggctggtgggaccggcaggagcgcaggttcgtccatccctcccttgtctccttcgcttcgccgcgtgaatagcgcctggcaactttcgggggtgagtctcgtctttttgaacacagctgacacttcgtctgttccccgtcctgcaggaacttcggcgagactgtcagtcgcctaccctcgctttcggctcccgaactcctcgcctgactcctccctctctcctccctaccgccacccagcttcaagtcaaccacgacgcgctcaacgtctgggcgcccgagcaccccaagacgctctcgtggcgggccggcgcttactttctcggcgggctcttttcggtcgtctacggcgtctacctcgccaacaagacgttctacccttacccggacgtcgtcttccgcgagtaccccaatgtgcgtcgccttctggctcttccttagctgctcggccggacgggcagtccatcgacagcgcctggggcaagactatggttgggtcagagggcgcgacgggagccttggcgacctgcagcggcggtgcccaccccgcagattcccttgctgacgccctctgtcctgcaacctttcacaggacggccagcgcgtcgccctcggcggttccaagcgcgagcgctaccctgtcttccgcgggatcgacccggccgacgagttcgagggctcgcagaaggagtactacgagggccctgggcgcaagaaggaccgccactactaaaactggcgggaatgcgctgctcgggtgggcggacgggcaaggtctgggaggcccgtcgaccgaacgtcttggcggtggcgagagagccgtcgcactttgtgtacataggccgcttacgcaatctgtcgctcggggatactggacagagaatggagactgggatgggtgagagggcgcagaggcgcagccacagggtggatcgggttgatgtggccggccagcatataagacttcgcccagggtggtcgcgtctcaacgcgcgcccgaacttgccctcgtcaaccccttttcccccgactcgcttcctcgatcccctactcagccgtctccgactcgcccgcagctccaactgtcacacgatgccgcctgcaacctctgccgccggtaagaaggagaagactatctcgctcaagggcgacgagggtgcgttcgtcattcgccagtgccgccagcttggactgctccgggtcggaccaagctgacgagtgagctctacattcgcgctcgatcgccgctatctgcagccgaggaggtgcgttccatgtcagccggtacgacgaggctcgattggacgctgactcccttttgtttctttggctatgaatgggtgtatgcgcggttgctccttcaggtcgtactcgagtacatgcgcaaagtccgcctcgtcgcctgtacactccattgggccgaaggccgaacattggattggcaccgcccgccgtttaccgagtgcgcagtgctgaccctctcgccttctcggccgcagatgaaccgccctttcgcagcgactgacgtctcggccaacctccacggctccgtgtcaaagcctctcgctcaaaaggcgctactcgcgctcgctcagaaagaccggctcatcaagaaagactacggcaagcagacgatcttcgtcatcccgcaggtgagccctcgccgacgactgcttcaagcgagattggccctgaccggctggtgaacttgtccgctgtcggcttgacaggcgtcgctacctccggtgtcggccgaatcgctcgctgcgctcgaccagcagctggctacgatccagcagccgctcgatgagggcaagcgccgtgtccgggcgttgcagacgggcgcgttcgtgaccatctgtgcgccgaaagagcaaagcaggttaacgctgatcttgtcacagagctcaatacgctgctccgcggtccaagaacagaagacctccccaacatggtcggggcgcttcagagttcggcaagtcctgtacggatgaaagttcatcgccgtccactgattccctcctgctgcttcttcagatcgagctaaagacagcccgtctcgccggccggcgcgccggcgcgcctcccatctcggcctcagatgtcgctgcggccgatattgcctgggcgcgcgagcgggtgcaatgggtcgcccggcgcaggacgtacctcgcgatcgtcgacggcgtcatgggcgaggcgacggccgagcagcgggcggagtgggaggagtcgatcggcgtcgaggcggcgtctgaggtcagtccatatcttccacgtcgcgagttgctcaggtgctagactctggtacatctgtaggacgcccttcgtcttgagaagtcagcacttgcagctggctccactggtgcccgccggcccatcccaggtcaaggcaccgtccgctccacggcgccggccgcacagcgcaacgtgaacgccatcgacgagagcgatcagtctggagagtttcctgtcaagaagccgaaggtgcaggtcgacgcataatcagtgcgctggacacgcgcaacgttatgagccatgtcttcgcgtcgactcaatcaagcgcaaaggagcagtcatgcaagacgccctgccaggcctaccacccaccgctcccgccctggccgtactgcccgccgtactgcccgccatactgctgttgctgctgtggcgggaactgcacgccgacttggcgagagggcatcatgccctgcatgaacgacatggcgcctccgcccgggctaatctgctgctgctgttgcggcggctggccgaacgactgctgctgaacgagctgcggtggctgcgcctgcccgaatccgtacggcgacggcgactgctgaggctggccgtacatgcctatcaaaggagcctgctgttggctgaggtaggagggcgactgcattggctgctgcggctgctgttgcggcggctgcgcgagtgctgggccatagctggccggtgcctggccgtagaaggcctgctgcccgctggcggcactcatgccggtgaaggagtgctgctgctggaggcccgggaacggcgcaagagctggtgcgagggctctcgatgagggctgctgctggagctggagcaccggaacgggctgtggcggctgaggctggttttgcgagattgacagcaggtcgctccatggtccatgcgagggggttggtgcaggctgctgttgctgctgctggagcgaggctgcaaatcccatgctcggattgtagccctgggcgcttgctgttgagctctgctgctgcacctgctgttgctgagccggcgctcgtggtggtggcggaggaggcgcatgcgatggtgggctgaaagtgccaaccggcccgacagacgacgaggcagagggtgtaggtcgacctcgtcgcatggcaggagcagagccagtcgtcgcatcggccgttgctgccagccgatgctcgagcacgcggccaaagaccggcgctgatgacgtgctcgatgagccaccgggcgtaggtgaccgtcggagaggaatatggtcgcgggtcgcttggagggtcggaggaagtggcggaggctgccggtctgagaacaaactactcgaggcgggcaagggccggggcgacatgtacttcttgcggatgtacctggaagaagggaggtgctcagtcgtaagtcagcgcgctggcttttcaagcacacggcagctcagtggcacacgtaccgttcgagctcgttgtcgcggccctccatctcgaggttcgtcggcggtgggttgacccggtcgtcattgttgcggagagcgttgccggcaaggttgccgcccttgctgagggcgtcgatctgctcgcgggtcaaggtgctgcgcgcgggaagccggacgagcagagacggtgacgacgcaggccgagcgaataagggcggcagcgaggagagacgagattcagtgagagtcagtgacaggtcgctagcaaagaggcggtctgaactagcttcattgaaaggatgacggcacgcactcgagcgtcaggctcttgacgcgtgagatatgcgagcccatcttgcggtggaccgaggcgcaggcgacgcagagaaagatgccgaggttcgaagagcaccagcgcggctggtttagcgatgagaggggaggcagtcagctcgtcgtccgagcgccaggcggctggtggcccaagggcgaccaacaagggaaggcatcggcgcaccgagggcgagctgcagtcggcgcagacgtcattgcccggccggcggaggagctccgagatctgtcgctcggtgcggatctgagtggcggccatccttgagctgttgagctagggaggaaggcgtttgaggtggctacccgagtgagctgacggtcggcaggggctgacgacgacgaggcgcgtgcggtgacgtcgcgaggcgaggagagaaggtctgagctgcagcgactgccgctggtcttgagggagagggagagtcggcgttgaaataacagcaacggctgaggagaaatcagagccaggccggggtagcaaagagcgcttgatgaaggttggatgagacgggcgggcgtcgcagccaagcttgaagccgggccgaacggcgacttgtacgtgcctgccagacgcgccacattatgtatttacctaatgtaaaattgacttacttccgcaatggcgcaacgggagtggtgtcgaaattggtagccgagtcgattttaagcatcggtggtgaaagccttgcgggttcgagtcccgctcactccagttttctttttaccttttcctccgagttgttccggcccctcgagcacgctggcaagctcacgagcgtaggtacccgcacgagatgctgacggcaagtgcaggttagcaaggaagagtgctcgcagcacctcacgcggtgacaaaacctcggctagccgtgagtgggttcgcgcgcctcgtcgccgttgcagcacctccaccagccctccttcaacttccttcgaggaatcgacacgaccggtcgacagcgtgctgctcagggacgaaagaagtacccggcgaccgagagaaagaaacccgctgacggcctgtgttggccatttcgacggaagcggccggttgcgctggatgcggcgcgggcgggccgctgcgcgtgcggacgcggctgttgttgactgacgcgccttgtcttgcctcgtcgcccctccgaagccttggctcgcaggggacaagggctgaaaaccgcggccgccccctccgtctcctctccctcgtccaccaccttctctttcttcccttcttccgctctctctctctctctctctcgcaaatctctcacaaacggctggcccgttgctcatcagacaccctaccctcacactcttcatcccacaacacaccctcgcttccccccgctcccacttccaatgatgctcccctcgaccgccctcgttgcctcggccctcaccctcctcgccaccgccccggctcctgcccaggctgcgttcgacctccgtgcgctcggccaccacgccaacgccgcgctcacccacctcagccacctgcctgaggtcgttggcctccgccaagcctcgggcgtcatctcgacgaccgtcacgaccgaggctgagctcgtcggcgctaagcgctcgctctgggctcgctactacggcgactcgcgcggcttctcgaggcgtgcgtcctccttctccgtttgcctatcgtctcccgaagctcgactgacatctcgttcgttcctcaccattttctcagccaagcccctgatcgagcgccgtggcacgatcccaaccggctggaccggaatcggctgcgtcaccgagggcatgagctcgcgcactctcaccggcctctcctacatcgacaatggcctcacgcccgagaagtgcatgacgacctgcctcgcccgcggcttctcgctcgccggtgtcgagtggtccgacgagtgcgttccccgtcccatctcatgcctcaaccagatcatctcactgattcttttgcctcctcgactctttgaaggtgctactgcggccagagtttccagggcggcggaggcagccctgccaactcgtgcgacgtcccctgcaagggtgacgccagcgagatgtgcggcggctattacttcctcaacgcttaccagtacaccgccgcgcccgagctgacctgcaacacgacgacggccgagacgccgacgcctgcctcctcggccgccgcctcgggtgcttcctcggccatggccgccgcctcgtccggcttcacctcgatccgcgcctcggcctctgctggcgcctccggctctgcctctgcctctgctggcgcctccggctctgcctctgcctctgcttccgcctcggccgccagcccgagcgcctctgcgacggcccctggcgtcacaaccgagtgggagtaccagggctgcttctgggacaagccttccgacaacgagggcctccacctcctcaagggcacctcgctcaccggccagaagaacatgtgcgtcctctgaagctcgcttgtgaaaaggcagagctgactcctacttccctctcctgcgcttctcaggactcccgagctctgccagacgcggtgtgcccagcagggctacaactttgccggcctcgagtacgggcaggagtgcgttgccttctctcgtttttctttcgaactcgcattgactctcctcattggtcctccctgaaggtgctactgtggcgatgtgacggcgtccgagctcgcttcgttccggagcaacgagccctggtgcaccgccgcctgcacgggagacagctccaaatcgtgcggcggtggctggtcgctcgccatctacgagcaggtcgacgtctcggacgagtgctagacgcctccgcacaccctccgcttccctcttagaccctctacggaaccccctatctcctctccccttgttttgtgctttgtgtaatctcccgctctgcctaccggttgggtcgggcggcctccccctctccttttgctgtccggaatggcaaaggaagggcgagtcatctctctatcccctctgtcgtgcattgtcttgttcccccccttcctcactcgcagagcgagtcccagacatgaagaagcgttgacgaatcgcgcgaccagcgaggcgaccttctctctgtcaatcgctccttcctcttcatccgctgcggtggcaagtgttacatcgcttcgctcgttgcccccgagcagcgcttctcgacctcaagggatcgagccccctccagcaccggccttccgtgacccctccacagccatgcccgtcccggccttaccaagcccaagcgcctgctcttcgtcctcgagcgccgcagcatagaactcggagcgctcgccccgagaaaagtagaaggccggctcgcgaccgaggacgacgttccgggtgacgagtacgtgtcggatcgacgaccctgggacgtcgtaaagtgcgtctgagggcgagaagtcaaggccgccagtgattgggttagccaagcacgagtacagatctaatcggcagaaaaggaagcgcaccttgaagcagcgactcctgccgtcacaggaacaaagcaccgtcagcctgctgcgctagtggcgggtgagacgacgggcctcaactgaccatgcgcgaagtcagagcccgagcgccagtgcccttccgaacggcctccttcgcaatctccttgagtgccggcgtagtgatcttcagctcggaacccgattctgcgagtagctgcgtgaacctgcgtgacgatccaagtagagaagtgaagcgactgtcagcggtgtggcgggcgagttaagcgctgtttgaccagacgcactgtttgacgagcgaatttcgcggctcgcacaggatacgcataaggtcggcttgcgtcagagcccgcagcgaggcgatgacaggcagtcggccgacaaattccgggatgaagccgtacgagacgaggtcctccgtgtcgaggtcgtcgagaacggcctttgcctcggttgcccggcccggctccaggctactgccgctcgcaggcacatcgaccgctaactcgtttctcctctttgctttcggcaatgtggcaccgaagccgatgccagtctgccgcgtgcgagcgaggatcgtcttctccctgcagcatcgtggaagcaaagcaaaacgtcagcgtatgtggaaggcactgaggtcctgcgaaccaaatacccacaggtcgacaaaggcgccgctcataataaagaggatgtttgacgtgttgacatggtaggtcctgccccagcaagaggtcagctttttggggacaaggtgatcagaagcccggcgaggacgcactgctcgtgcttactgccggcgacctggacgccagtcggtccaaatccactgccggccatcgacggaaaagggctagtcttgcgtcgccggccaggactcgtcgacaggtcgaccggcccgtgggggtgcatcgggtgctgagacatggcgtcttggtcaggccctcccttcatcgtcaccgacacgacgtttccctcaagcaggcgcagaagggcctggagaatcagagtcagcggtcaggaaatctacaaagaggaccgggccaagacgcacctgctgaacgccgaggccgccgacgtctttggtccgaccctcgccgctcgacccgctgtccgacttggcgagcttgtcgacctcatcgaggtagacgataccgacaccggcaagttcggtgtcgaagcctgcggcctggagcaagcgggcgatgcagacctcgacgtcatcaccgatgtctgtcaaggtcagggccgctcgacggtcagcctggaggctcacacgggctgcaaagcgtttgggcactcacagccggcctgggtgagagttgtggcgttgatcgtcgcgaatggcactgcaagggcctgtgacagcgtctggacaaggagcgtcttgcccgaaccttgttcgatggcttaggagtcagcaggtcgtccggttgcgacgacaagacgcgacaaacgcaccagtcggtcctatcagtaggacgttgctcttgctcatccgaaccttctctgccggctcgaccggctcgactaccttccggctccctcctttgctgcctttcgaggccaacgacttgccggccggcccatcgccggcgacgtgctcctgctggacgcgggcctccatctgcgcgcgcagggcagcgtcgcgcgactcctgctcctcgagcgctgcgagggtcaggttgtgccgggtccggatgtagtgtgagtagacggcagtagagaggacctgcgagggaaggtggagcgcgaccatggatgtcagccgcctgcttgcctctcagctgctgcgcgccagcgctcgccgaccttcttcgccttagtctgggcaatgacgtagctgtcgagcagctggtgcagcttgcgaggcgtgtcgtactgtggtgccggctctggcagcgggatcggctcctcctcgaggtcctcttcgggtgctgaagggtgcggccgtcgggcgtgggcggtcgaggcgcttcgccgcccaacagcagccgctgtgcctgcggcagatgtccggccaaggccgtcgcggcgtcgaccaagagaggacttccgctgtatagccgtgtagaagtgcgctggctttgcagagaccgcactcttcgaggacgaggacgagccagacgggccatcgtgccggccgagatggtgcgttgggcagccggccgcgcctccgatcgcgagcgagcgacggccgctggcgaggccgcggagagctccctcgtagcgggcggcgagcggtaaggtagtgattcgcgtccgggcgagcatcctgccggccgtcgacgagctcttgaagatgttgcgtccaggacgaggatgaggttggagggatgagctcgaaggtgccggcgagctcgaaccggggccttcgcgccgggcgcgtctccgccgatacgcgagcctgtcagcctagccttgctctgcttttgacgacgacctgcttcgacacggaagggcgtgcaagcgacgaggtcaaccccgagggagcaatcagaccgtcgcacgaacatggtgcggcagctctcgctgttcgactcgtcgaccggacccgacgcgtcgtgcctgtcgctgatgcgcgttcctccctgcctgctagcccatcctaccgaccctcaatctctcgctgctcctggggtcgttcagctactacacggcctgggcgctgctcacgccgcttctgcccgaggcgtcgccgcttcaggccttcttcccggcgcggacgtgggcggtgcgcgtgccggtcggcatcctgctcgccggcatcgccgtcgtcctcggtttcgtcggttggcaggggctgaacgaagcgcgtcgactcgagaggcagaatcgcagggctgctgaaagggccaaagagcgacgagccgcttgatcatcgtggccaacagacgcaggctggacaacgagtgcgtacgttgcaggccgtggcttgcggcgcagtcgctcatcagaatccctccctgccctgcctcctcgaaagagccctcgtcctcctgcgtctacttcgtgcgcaatggcagcggcagctcagccagcagatgactccgtcggcggagggtttcttttgagtcctacttgcagaggcaaccccctcggctgccgtcagagagcccgactcgcataaggcatcctcgtgcgtcgttcctcccttgcgccagctgagtacagggcattgacgtcaaccgtcttctacctctcgccataactcgctctgggctccgcaagacgataactggagcgcggccaaacagcaggtcgactgggagagtctttcgctcacgcttggcatcgacccaacgtctcccagggtcctcaacctgtgctggcgtccagcgagagcccttcactgtcatcgacgataccgacgctgaagttgtgcaggcgacactctgaacttctgacgttgtcgacggcctcgtgccagcccgataccattccaggcggtggcggcgcgcattcagaagcgagacagagcacatctacagtgtcaaagtgtctggtgaaggtggaggagcgaaagaaagggggcggacgacgtctccaggacgcaagtataaagggaagggcggagaaggcacaagagacgacggtcctcagaggagcggcgttcgttcagaatcatcccggtagtacgacatcttgcgctggcgcatggccggccgccggaccggctcgggcgagaggttgaagagcggcaggaagcagaaggggaacaggtgcttgaaccactttgggctgttgcggtcggcaaagagcggcggcttgaagatgcgcgacgagagcgagaaggtcatgaccgagaggaggatgagcgcgcagatggcgaggatgagatcgaaaataactggcagggccgggacgcctgatcagcttgtccggtctgacgggacggaaggggtgcgcgacttctcagttttcactcacagtcgacgggatccaggatgcgccggtcgaggtacttgtagcgcgggcccattggtctgcaggggacgaaggagggatgatcagcctgacgaacatccgcttgcagtgactgctgccccttagccgacgcacccattgacaaagcgacagttgccaactgcgagatgacaagggagacgaacgtcagaatttgaggggctaaggacgacgcaagtcgcactcacagtagcagtactggccctggacctcgcgctcgccgccaccgacgctccaaaactcgtcgccccaccgcccggcatagtcgagcacgcccttcccgacggcctcgcgcggcttggagccgttgacgccggccggctcggttacggggacaaacgtcaagtcttgcttccaccaggtgctcgtcgacgtgttgagccagaaggctcggtggttgagcgccgggtcccagagcgggccgggtgaggtgatgtcgtgcagaaggccaaacggcaagaggtattcttgccggctgcaaccgcggcgagtgggaggcgcggatcagtcggagtcgaggtcgcacaaggaggggtaggcagacggacgcaccccgaggtgccgtacagagcgtgactgccctcggctgagtatacgaccggtcggccctcccagccgacgcgttccgcccgcggcttgcgcatggcaccgtccatcccggctccatgcccggccttccgccgccagccaagggtgctcgcctcgtcctcgtcgacctctgctgcggtggccgacttgcgcgcgtgtcggacagggacagagtcgcccttggcgatgacgtcgaacggccagacctcaccaaacgcgtgctccgagaggaacagctgttgcggctcgccgaggtagaagcggatcatgatgtgctccctaccgagcgacagccaggggtggaaagtgtcaggactggcttccgacaagtcgtctgacgcttgactaaccagtcgccgagatgatcgccgaagcgaatgtcgaagagcgtgttgccttcgttgtacctgaaggtgctccgggaagtttagcagcttgagtgtacgcggtagaccagccgggcagacttacgagtagaaggtaaagtagaaggcatcgaggtagcccggagcgatgatgtcgcccttgtcgacgaggacaatgtagatctcgccttcgctccggccgttggcgtccgggatgccatactcgctcccaagccaggtcgcacggccctgctcaaagtcgggcgccatcacgccgccctcgaggtagaggtcgctccggttgccgcggttgccaatgtcggcgaggagaggatgcgcatgcggcggcaggtcgacgaaggacgtgttcgtccagtggaggaaggtgtgctcgagatgcgactcgaccgtcgacggccagtatgattcggtcagggcgaggtggattagaggcgcatggcgcaggacatagtctgggatcgggccagacgactgcggcggatccgtcgccgggtacgtcggcagcggtgacggcaaggcgagcgcgagcgctggcaggagcaacgccagcagcggagccgggagcgaccgcatcgcgctcagtagcatctgcagagcatctagtcgtcagaagatggccaggcagaggcgggagttgcgggcgactgacagctcggggcgggaacgacggcgagcagcccgaggaggcggcaggcgcggctgaccgagtgagtcggccgaaatgcttcagccggcagaagtccttgggtcgctcgagtcggaagccttgcaggcgagcaggctggcttgagaggtgctgctagggaaagctcaggtggtcgtgatggtcggagagacgacgagtggctgtaatcggcttgcgatgccacggcagctgcggcgtcggcggccgacccgtctcggaggcgcagcggaccacgagctggcgttgccataagctgcagcaatgcctcccatcggactgcgacgggtgcggcctggacatgcagcggacctagttgagatcgctttcaggtcccatccgaggtcttggtactgatcccgggagcttaggagacgacgacgacggcgagagggctgaaactgcagccgcagagagacgttcggcgcttgcggcaaggcaagacgacgcttggccgcctacttccttcctgcctgctaacacccaccttctttcttctgctcctgcttctgcccttgcattcctctccgacacgatggcttccacgaccaagatggcgtccctcggggcgcgcaccgtccagaatgcgacgcgctacctcgcttcgccgccgaccgtccgcgtcgtcgcctgcccgttctcgtgcgtttcgtgtgcacatgaccctctgacccgtccgtcaactgaccctggtctgcgacctgctcatctcctccaaatagtggcggtcaggttcgtcgtctgttctcatctcgttcgagctcgcacggctgaccgcgccgctgcctccgcctcacagaagaaccccggaaccgacctcgcgccgacgtcgctcatcagcgccggcctcatttcgcagctcgagtcgctcaactggcaggtctcgcactcgcccgcccagcacccgcacttcacgtcaatgacctccgccgaggacccgccgatcggcaacatgcaccggccgcgctcggtcagccgcgtctgcgaggaggtcaagaaccaagtcggcgccgcctgcgcaaagggcgagctccccgtcgtcctcggcggcgaccactcgctcgcgatgggcacgattgctggcagcatgtccaagtaccccgacgcatgcgttatctgggtgagtctgtgcttgcgcgcgaacatccgccctaagttgcgcgagggctgacaccaatctcacgtgtccgccaggtcgacgcccacgccgacatcaacacgcctgactcgacgacgtcgggaagcctccacggctgccccgtctcgttcctgcttggtctctctggcaccgacgtcgcgccattcaacaagtggatggcgccctgcctcaagcccgagcagctcgtctacattggcctgcgcgacgtcgacccggaggagaaacggctcatccgcgacctcggcgtcaaggctttcagcatgcacgacgtcgacaagcacggaatcggcaaggtcgtcgagatggcgctcaatgctgtcaacccggcgcgggaccggccgatccacctctcgtacgatgtcgacgcgctcgaccctctcgtcgcgccctcgaccggcacgcctgtccgcggaggcctcacgttccgcgagggccactacatcgccgaggccatctccgagacgggcctgctcgttgcgctcgacatcatggaggtcaacccttcgctccaggacgagctcagcgccaaccagacgattgctgtcggctgctcgctcacccgagccgcgcttggtacgacccctgccgcgctctggagtgcctcggcaagcgtcactgacctcatgctgctttcccttcgtccgataggcgagacgcttctttaagcgcctcggcaattctgtcacctgaaacctgtacataaactcaagcggtcggccgccaatcatgccgtctgctcgcctcatttcccttcctcctttcccgcactttcttcgagtcgcttcagctggcccggcaagcgcctcattcctcgacactcaaccgcatccgaccctctcacgaggcaggcaccccttctcggctccttcttctgctggcacggcaagaagccgaacccacacgccctcgatcccagaaacgacgtctcctctcgcaatcgcaagctcctctaacgaaacgcaaacctccccctgctacaacgaacttctgctggaacggcaagttcaccttaatcgtcctcctttccttcatcgtgcccgtcgggcgatgtcgtgttgtcaacaatctccccatcccctcctctgccccctcctcgtcgcgtgtggtaccccatgtgctcgagacatacagccggccctgaaagtcgaaggagagaaagtgagctgcgagaggacggggacgacggacaaaagagcgcatcagatcgcccttgctactggtggcagctcgccctcggccggccggcggacaaagtagtagtagttgcactgcttgccgagctcgcccagattcggactcatgagctcccactcgcccttccagggcagataggccacgccccgagcctcgcggactgagccgccgacggctgccccgactgctggtccagcggcaaggccggacggagagccggtccagccgatgccgtcaaagaagccgtcgagctcggccggcttgatgtacttgtgcgagtggtgcgtgccaggcgagacgagccggaggaccgactcggccatcgttaccgtcagcaagtgggcaaacggcgtgcgcgagattgtcgagagcaggatgtggccgccgggctgagcagaataaacccgagattagtattacgtctcgtgctcgagggacaacactagggcgcaccttgacaagcttcgtcaagttgagaaggaagccctttgggtcgtcgacgtgctcgaggacctccatcgcgcagacgaggtcgaattgagcctcgccctcggcctcgagcaagtcctcagccgtctgatggcgatattcgagccgcgcagcgcccgacgtcgacccaggggcaggcgaggcgagaactgggtcgagcagggcatgcgtccgggcgagaggaatgttggatggcgtcgcgtccacgccgagcgtctggccaccgagccgggcaagactctccgacaggagaccggcgccgcagccgacgtcaaggacgataaggccctcgagccattgaccgccccggaccggccggccagcttcgacggtggtcgagccgaagcggcgggccgactcctcgagcttctgccggaggaacgcgagccgggacgggttcatcttgtggaggagtgcgagctcgccgtattcgtcccaccactgggccgaaagcctgctgaaatgcgagatttcctctgcgttgaccgacgacgtcgatggggatgaggatgaggctggtggcggtgccgatgcgtacgcccgatgggacggagctcgaggcgcgacgacggcggtggaggtggccgctagcctgacggcagcggaggctcgcctagcgaacatcgaccggagcggcggcaggcgccgaggagcgagagaaggcatgcgagcgagcgacggagcgacttcagctgatgaaagtcgacgatcgtgggcaaaatgcaggtggcggatggcggtgacggagcttcgaccgtcaggcagggcgatttggcgacgggcttcgcctcgacccctttccctcgaccatcaacttccctctccctccaactcagcacaatgcccgtcgagactggatgtacgtctgtgcttgctttcgcttcaagtaatgatccgttgctgaccacctcatcgacaaccgaccagactgtgcgtgctcgcagtcaggacggcgcgcaaagggccgctcggagctcggctgctgacccgcctctccgcttgcagacgacaccctcgaggtcaagcctgacgcgaccgacaacgagctcaagaagtcgtaccgcaagctcgccgtcagggtgcgcaggaagtgaacagactcgtgcggcgatcagtgtagctgatgtgctcttcgctcgctgcctccgcgtcaccgccttctcccccctcgcgctcggccttcgacagtaccatcccgacaggaacccggcgccggatgccaacgccaagttccaggaaatcggcgaggcttaccagatcctgtcggaccccgacctccgtgccaactatgacaagtacggcaagaagcagctcgtccgtcccttcgcctcttcctcgcctcgcccgcaccgcaagccttagccgagctgcggcgtcggcgggctgcgcggcccgccatccaacgccgcgttcgctgaccttccagactttgtcctccagggccagcccgatggcggcatgcaggaccccggagagatgttctcgtcgatgtttggcggcgaggccttcatggacctgatcggcgagatttcgctcatcaaggacttcatgcagcaggctgaggttatgatgtgcggccgaccctggctttccccagctcgctcttggccgctgaatgtcgttgccttgactttcgcaggagcgaggaggacaaggctgcgatggaggccgagatggccggtgcaagcgcgccgatgggcgagacggctgcgacggccggcgagcccgtctctgcgccaggcgtcccgctgaccgagtcgtcatcgacgccggcgtcgacggccgcgccctctgcaacctcgcccggagccgagaaggctgcgccagccgctccgacgacgtcggccacggctgcagctgccgccgctgcctcggcaccagctggccagacggccgaggccaactcgcccgcgagccagtcgctccagcaccacctgtcgtcgtcgtcgggcgtcccgactgcttcgggtaacacaacgccgacgtcgtcagacgcagcgtccaagaaggccgacgccgccgcaaagggcaagaagccggcgatgacgcccgagcaaaaagccaagctcgaggagatggacgccgcgaaggagaaggctcggctcgagcggattgagacgctccagaagaagctgattgaccgcatccggccgttcgtcacggccaagaagcccggcgacaagcacgacgaggagacgcagcgcttcgaggccaacgtccgcacccaggccgaggacctgaagctcgagagcttcggcgtcgaggtgcgtcccacctcgccgcatacccttgacggccggctgacgacgcgatcctgccaccttatcagctgctccacacgatcggtgcttgctacatccagaaggcgaccaccttcctcaaatcgaagcgcttctttggcggcggctttttctcgcgggtcaaggaaaagacgacgatcgtcaaggagggctggggcgtcctcggaagcgcgatgagcgttcaggcggcgatggaggagatggagcgccagcagcagcagggcacgctcggcgaagacgagctcgaggcgctggccaaggatgtcacgagcaaggtacatccgcccaagtcggctctgcttgtctggcttgctgacgcccttgctacccgctgcagatccttcttgtcacctggcggtcgaccaagtttgaggtcatccaggtcctgtctgacgttctcgacggcgtcctcaggaaggaggacggcgtgacggacgagatgcttgcgctgcgggcaaaggtgcgtctgctcttcgatcttcagacattcgacattctcgctccgcgccgctgacactttcgtgctcgcgcttacacaggccattatctcgatcggcaccattttcaaggcaacggttccggacgagacggacgaggaacggcgcgagctcgagcggctagtcgcgcaggctgccctgccggcaaagaagcgcagagaggccgagcgcaaggagcgcgaggcgcgcgagaaatctggcctcgggccgtttggctttgcggcggccgcgggcggagcgtcgacgtcgacgccggccgagaatgaggcgcacgcgcacgaggaggaaaagcgcgagaaagcccggctcttcggccaccaccacaagaaggacaagaaggaggaagccaagctttgagatcccttgctcccctcctctgccttgcccgccgtctgctggccgatgccaacgttactcgccgctgcgacctacataccccgggcgtgcagagcttgttatgcgaccattcaatcgtggtgcacatgcccaagtaaagggcaggagatagatgaggcctttggaggcggggcggtggtgggcgtcgcacggccacgctctcctttggcctggcggcttctggagggaagggttctggcccctttgcttgctcggcagaagcgccttcgggtggctgaggagagtcaggggacaagagcgacccgagcgaacgagcggtaaagaggggtcggccggtagaacatcgtcctggcttgccacttgctggttttgacggcgcggctgagggacaaaggatcgacaggctggcgaggagggggatcctcagggaggaacacccttcttgcgagagtgaacccggcgggagcggccgttccgagcgtggtcagacgtcgtctgccggagaccaaggcgagtccgagcgattccgaaaacggctcgaagacgccagccgtgcgccggccccatcgctcacttggccggcggcggcaacaattccagctcgcgcctcacctcgctcgcctccgcctccgcctccttcgcccgccgctgcagcgcctgcgactccttatcgccaaagatcctcacagactcgcccctcgcgcgtttcgcggccgcccaccgctcgcgtcggacggcagccggcaggaggcggacgacgagctcgggctcgggcgagagctgcgcgcgacgctcggcggccgagaggatgcgccgggcggagacgaggcgggttcggaaatcggcgtctgcgagaagcgggcaggcgggtcagcacgcgcgacatttgagcgccgtcgactgacatccctaggacgaagggctgaaagggaggaaagaggcgcaccgtaaaggatgcttcgcagcgtcgactccaatggcgcctccgttgctcgtcggtagagctcgacgatgtcggttgccttgacacaggcctcgcgccggcggaacatcatcaggctgatgttgtgcggctggggcttcatcatcggtagcggcgctggtttacgcaagccgagagaggagggcaagcgaccagaccatcagtaagataagaaaagtgagagggggcctgctccggcgacggaaggagtggacggacggttgaacttggacgcctggaagacggcgcccgtcgtaagtcctttcttgtcgggccagcccggaatccgaccacccgtgtgcctctgggtacgtgtaagaacaaaggtcagccggcacgtgagagaacaaacggggaggccgagggacagacctcgcggaagggcgtgccgagggcgtagcgggcggcctggtggccgtaataggcgtgcagccggcctacgacgcgatcgatgccggcctgcgtctgaagctcgtcgagcagctggaagcagaagcgtgtcagctttctaaagccctgcttgagagggcgcaagtaccgagcgaaggcggagaggcacctcataccctcgccggaggtcgttcgcagcggccgcctcgtccgtctctacacgtttcgcgcgaaactgctcgcggacaaaccgcccgagttcggcatagtcgcgggggaggccgatccgtaggaggtcccggtagagaccccagagcgtcgggagccggtgggccggatcgaccgcccaagcgaccgacagcggcggtcggggtcgacgttcgggccagatcctcggctgcccctttgcgttcggcgcaaaggaggccgcagattccccttcagcctgcagcccgagcgagcagagagaacgctgattgtcccgcagaggcggctggttgcgtggaggaaagactagcgccttgtccgacgaccggctagtcgaagggccggcggttgaagagctgtcgtctgccgagctcgagctcgagccgctggacgcagcaggcgccgctatcgaccggagcgcgagctgagcggcataaagcgggcctgggaggaagcccagcgacgatgctcgctcgcctcggcccatgcgatcctcaccgaggccaaagaggacgggcgcgacaggccgggccgcagcgggtcggcaccgccggcggcgcttgggcgcgttccagcggggcggcggcggcggcgaggcaaagatgatgcgctgggcagacatgcgcggtgcgagtagggcgctactgcgttttctgtccttgccttggtcgtcgcttggtagagatcgtcgtcgtctagaagaccggggcagtcggccgggctgaatgagggcgggggcggaaagctagggttacagcgcacagcgcctcgactgagcaggaaaagaggggccggtccggtcgcctctcgcactctcgacacaccctcaatccacagccctagacacacgacatggccaacttgcgcgtgctcgccctcgaccagcgctcgctccgctcggcagcgaacgtagcgatggtcagcgcgacgacggcggcaccgcggccgggcccgtcctcctcgcagtcggcgcgctgcctgtcgacgacaacgcccgacgctcgtctcgacgcccggctctcgtcgccggcctcgcgagcccgtcagctgctctcaccgctacgcaaaggtcagtcccgtcggtcggttgcattagagcatcaaaggccaacgatccggtcgagccgacgctgagtctcccttgcgatcccttcgtgcagcgaatcgaccagtccgccgaccccgccagcgcctcgatgtcgaacgcgccaaggacagttcctcacccgaggcgtctacgagccaggtcgctgtcgctgcgaagcgcaacgcgccgctcgagcagcttgagacgctcctcgcggccgagggccgggtaatgagcaactatgcgtacaacctggccgagataacgcaggccaagcgcgtctgggaggcctacctcaagatccaagaccacagctcgatctcaaccgagtcgtggcgggcaatcgtcgaggccgtcgtccccaaggcgctcgtcgcggccaaccatcggcccaagcggtggcggacgcgcaagctaaccgagtactttgagcagggctttgacgaccggcttgagcgggtcctccgcgacaagctctcagtcggcctcggcccgagcgaggacgacctgctgtttatgctcgagcagtttgccgctgcgggctcggtcaagcggtccgaggaggtcttccagcgcctgaccgaccggggctttacgccttcggagcgggcgtttggcctccggctcgaggccatccgggtctggctctggcgttacgacagccgcgaggcccgcgatctgattgagaagggcgacctcatgagccggaccgaggcggtcgcctacgtgcccgacctcgtcgccggcatcatggtccaggtccaggcgagcgagtttgcggcggccttgccggaccggctcgtcgacgaggcctgtctcatctatgcccgccttggcgcctgggaccgcttcaactcgctcgtccgctggggctacggcgtcgatctcgacgtgcccgatgcgatcccgcaagagtacctcgaccgcgtgcaggacgacgacgccgttctctcgcgcgggatgcgccgggccgggctcgaggccctcctcatcctctgcatgaacgctggccagccctggcgggcgctgtcgtcgctcgagatcttcgcgtacgacacggtcccgccgtcgcacctccacccggccctctcgcgtcgccgagcgccgaccgagacggccgccgagcgcgaggagcaggccgaacggacctaccttcgcttcgccccgcctctaccgccgtcgtcggcgctcgcactcatgaacctccgcgcgacgccaatcgccgcgcccgaagagtacgcgcccgaggccaaccggccgccgacggtcgacgccgagcccgaagcgccgaagacgggcgtcatctacgaggttgtcgaggccgagcgccgctcccggccaccggccatcgtcccggatcaccgaatctactcgatcctgctgaacggcatccgcgacatggcgaacgatggcagcggcagcggctcgctcgttgccctctaccggcatctcttgacgcgcgcactcgctgacggttaccaggagcgccagcgggtgtcgagcacgctcctccggctcctgagccatccggcagaggcgaccgacgcccgcttggccgaggggaagacgctcaggcggcatacgctcaaggtccggccctactggtttggcagcctccggcacgtcgtcgctagcgagaacgtccggacgcagtttgaggtgctcggctgggccgaggacgagttccgacactggcggctggccgttgagatggaccaccgcatcctcgtcaagacagtcaatgtcctcgtcagcgaccggacggcggccgtcgcaacgctcaagacgtcagaaggtgcttccgggtctactgggccgcttgcttttgcgtgcagcgaactaaatacccctgctcgctcctaggccaccccttccgcgagtcggcggccgagtcggtccggatcgcgaccgacctcccgctgatgaacttgcggtcagagctccacgagtcgcagtggctccgcgacgagtcgaccgaggtcttccgctcgctcgccgaggcccgggtccgggcagcctgggccgacctccaggcgatgcacaaactcctccaggacggctacccgccggcacacgagctcgcagacggctcgacgatcggctcgcgggtcgacgcatacgcgagcttgctcactgagcgtctctgctgggagctcgagccctcgagcgcgcccgtccaggcaggagccgacccgctcagcgtcctcggtcgcttcgccgcctttgcgcgcgtgatggagcaggactcgtttgggccggcccagctcaagccgagcaaccagatgctccagttcccgtcggctaaggcgccgaatctgctcgagatcgcaacccaggactatgtgccgccggtgcacccgaccctcgacgaggccgcgcaatagatgccacctggcgagaccaccagtaacgtgggtgagggggggcgcatgagatcgtcaaagaggctcggcgtggcggctggaggcaggagagggagcaaggtttaggccgacgcgaactgcaacgtcgagcagggctcggtcagcgggtcgccataagcaagacctggccgttcgactgaccttcttgacgtagtccttgaccgtcgcgtcaaactttttgcggtccgtccggaagacctcggcgacctgcgtcggagagcaagatgaagaagcggcgcagtcagtcgacctggcgtcgttccagtcttgaacgatgcaggacgcacgctcgccagcagcgggtcgtccgggttcggctctagcagaagattgtagatgctgagcaggactggcaaggagggcgagcaagggagggtcagctgcaggcgccgcctcaggggccggagacagggccgcaccggtcgtcatcttggtcgccggcttccactcttccgtcttgaggagggcgacgcagatgttgccctcgtcgtcgacgttcgggtggtagatgcgcgtgccaaacttgatctgcagaagaggggcgtcactggtcagcgagagcggaaggcagatgagggctggaagagacgcacgagaggggctgtcgacggtcgagctcgccggcgtcagctcgagcccattcgactggcaaacgacagcaacgacgcacctttgaacggatactcgttggcaaactctaccgagaccttgaaagagcctcccttgtacggtgatgcgctctagcgagaggaagagaggccggtcgggacgcggacaacgggggtcagtgcggcgagcgatggagcgactggccgaggccgacgacaagtcgcaccggcccagccatgacgacgttccacttgagcaggttatcctcctcgggctcgaccttcaggtccttaaggtccgctgcagcattgacatccttgagctcctgcgatgggacgaaagggcggcaagcggcggcgaggtcagccgagtcggagctcgctcgaggccgttgcgacgagctctcttgctccgacgggatggccgtaccttctggactcgccggacacttgttgatgccatggtctctgatcgatatatgagaaagggtcggcaggaagagggaaggccaggagggaaggagaggtcgagtgggggtcgggaggcgaggacgaaaggggctggccgtccagggtctgctctttgccttcgaccgccgaccatcttccagctcgctccccaatacctccagcttggtgaaggatggcatttataaaaccagcgaaggagtcgcagggggtggtcctgccacccatgcgcatcggcttcatccacccggatctcggcatcggtcggtccttcctctgcctgcattcgtcatccgggcctgtcgacgctgcctgcgcccagtctctcaggatcatagcgctggctggctgcctggttggctgtcgttcgctcctctgtacagtagctgacgtggattgtgctccttctctatccaggcggagctgaacgcctcgtcgtcgacgccgccatcgccctccagcgtcgcgggcactcggtcgagctgtttacttcgcggcacgacccgacgaggtgcttcgaggagacgcaggatggtaagccccgtctcagctctggctccatctgcagagatcggagctgactacctttccggcctttctcccaggcacgctcaagatcaacgtcctcggcggcgccctcccgcgctcgcttctcaacttgctgcacatcatcttcgccatcctgcgccagctacacctgacgttcgcccttgcgctctcgctctcgccgctcgttccatcggcgctcaagcctctgcccgagttacgaccgttcgacgtctttttcgtcgaccagctctcggtctgcgtcccgctcctccggtggtgtctccagacgcgggtcgtcttttactgtcacttccccgacaagcttctcagcggcggctgggacctgacgacggccgggagccaggccgggccgaccaagaaggaggttggcggccttcatgacctgctcaaggggctctaccggctcccggtcgacctgctggaagagttctcgaccggtgcgtttcggcagtctgacaatgttcgcacagtccggccggcgccctgacgatgcgtccaccttctggtatctcctcaaccaggccaggccgacgtcatcctcgccaactcgctcttcacgtcgcgcgtctacaagagtgccttcagctcgctcaagagcctgcccgatgtcgtctacccaggcctcgacctctcggcctttacgccgctgacgccaaaagaggccaagaacccggaggtcaagctcgtggagtcgtgcgtacttcgcatctgtcctttaactcgagcttcaggccaaggaactgatcgcctgcctcccgtcctgcagcgaacgtcggacgctgctctcgctcaaccgcttcgagggcaagaaaaatgtcgccctggcgatcgaggcctttgcccgactcaacaatgacgcaatcgttgacgaggagacgtttggcaacctccggctcgtcctcgccggcggctttgacggctcggttcgggacaatgtccagacgtttgcccgtctgcgctcgctatgccgctcgtacggcctggcgtcggccgtcctctccgagttctcgctcaagccgccgccggccgagacacaggtgctctttctccagaacttctcaaatctccagcgccgggcgctcctgacggcgccgtcgacgatcgccctcctttacacgcccgccaacgagcactttggcatcgtcccaaccgaggccatggcctgcggcctccccgtcctcgcaaccgacagtgggggcccgatcgagacggtcgtcgaccgctcagcggccaaggccgacgagcacggaacgggccttctgcgcgcgcccgaaggacccaaatgggcggccgcgcttgcagagctcgttaacctctcgccggccgagcgggccgcgatgggcgacgagggccggcgtcgggtccgcgcgctctttgcgctcgagccgatgggcgagaagctcgaacgggcgtgccggaaggccgaggagatgggcgccgtcggggtggacgacggccggctcctgctcgtcggggctgtcgtcgccgcgctcttcgcaacggccctctacgccgcacggttcctcctccttcggtagatcaatggctcgtccagaagtcggaccgtcagcggtctcgagcagcatgatggccgtcgtacgcgggcggtcaagaggcgagcgttcaagaggggcgtgacgggtcattaagatgggagacggggttcaagagcttgatcgcgcgctactgcgcgcagacggcggatgttgctcgctggtcagttccagtccgaggccttctgcagagggtagaacgagagacgggcttcagcgaccggctcgtgcgccaagccccgaccaagccagcggacgtactgccaggctcgcctcgccagcggacgacttccggctgtcgacctcgcggttgtgctcttggagcctggccgaaagctggccggctttgggatttgaggtcgaaatgccccgtgcggaggcctgttgggcgagagggggttgagggcgagcgaaagaggagggttagctcgcgtcgatcaacggacgacagtggcccagagacctggcgggatcgcctgggtaagctctggagcaggccgtgtgagctctgattcgagctcgccctttccctctagagaagacgctctcgttctcgcggcgagcgatggccatcgctaagaggggttcgagagaggcgtcgagcgactcaccgcctgagcgcgctgctctgcagcccgtgcagccgccgccttcgccccggcattaccatccagcctggccgggtcctcaaagccgtcgccgaccgtcttgccgccgccgacgaacggctgggagaaggcgtggccggaccctcctcctcctcctccgaccgtcgcgccggtgttcggcaccgggcccgagccgagccgctggccgccgccagtcgtcttggtctttggcggtgcctctgggctagacaggcagcttcccatcggccggatggatttgggtggtatgtgtgagagagagatgaggaagaggagcgtcgactcgtcgttgatggtcgggagacaggcaagcaagcttcgctaatctctctctcctgccccgggtgctgctgctgcggccgctgcgcgtcggcgtctcttccctggccagaggtcgccctcggcccaacttcgcccctctcgccaacccctcaaccgcatccagcgaggcaagactctcctgccatcgagcagccagcttcctctttgctgctcagctcgactgcgtccgccggtcggtcgacgatgctcccatccgcgacgctcccggtcgccggcctcagccgccgccgccggctcctccctctcggcctcttgacgctcgttgtcatcttgccctgcctcttttggctccaggccagccggtcgaaaccgacgccggtttcactctttaacaggccgccaggcgaggacgagcttgtcatcacggtcggccagctcgtcggcctcggcgaggccgagctctccgccgcacaggacgagtacttccggtcgggccagcacaagcgggacgagagcgagctcgggctccgactagggagctcaaaggagctgcggccagagggctacaaccagacgctgagccgggcgcttgaccgctactttgagccggcggcggcctgggcagacagcgtcctcgcccgcctcgcgccctttggctcgccagagtcgaccgcagcacggccggcgctcacccggaccatctacacgacctcgaacaggatcgatctgccaacccaattcaagggctggagcgaactcaatccagagtgggaagtccgcttcctcgacgacgccgccctcgaagcgtgggtcgaggcgacgttcccaggctcggccctcctgagcgagtggcggctcgtgacggacgtcccgggcctgacgggcaaggagcgcaaggtcctcaaagccgacctcttccgatacatcgttcttctcgcgcgaggaggagtctattcggataccgacacgtcggccgtccgaccaatcgagcaatggggtcgtaacgaccctctcgttctgacgacaccccttcagtccctcctgcccgtcctcgccgcgctccccgtcatggcgccgctcgacgctctcaaggccaccggcggctcgcacccggcaccggcgctcgtcgtcgcactcgaggcggactcgcctaagacgggcgacgcatggcgcgatcagacgttttcgcgcgggctgcaactcgtccaatggacactgctctcgtcgatcggccacccgatcatgctcgacgccgcgtcgcgggcgctcgatcggctgcgtgaggcgcgcgagaccgacggcaagggcaaggagtctgtcctcgacctcaccgggccgggcctcttcaccgactgcgtcttccgcttcctcttcgcccgctatggcgtcaccccgcgccagctgtcgggccacaaccggccggtccaggtcggtgacgtcgtcatcctgccgcatagggcgatgcaggccgacatgtcggagggcccgtcaaacgaccaggacgtcgtctggcacggcttcttgggccgctggaaggagaatgattgatgatctactttccacgactgaagggtctcattctagacggccacgggcgcgcggattgaatgggttcgctgcagaaagcacagccgtcagcgcgagcgaggagctcgggacgagtggaagacgcacctctttccgccggctcgccagccgcaggccggcgacgccgagggcggtcccatacttgaagaagataaagagcgagacaaggacggtggcgatcccggtggcgacctgccaaaagaaggcgctgtcgcccgaaggattggggccagacggctcgtcgccttcgggaaagatgccgctcgacgggaagcgaacaaagttcatgccccagaagccggtgaggatcgtgaatgggatggcgccgacggtgctgcgggaggcgaatgaggtttgatgttaggctaggtgcggggctgcaacatcgtcgtctccggacacacgacagcgtgagcacctccatgcttcggttggcaagaaaggcgagctcgttgaagacgaggtcgacgaggccggaagcccgagccgagaagaggtcgagcgattccacgagaccttcgaggtggtcctcggtgtcggagagatagatccgtgcggctggcgacaggtggcccgggacgccgtcgttgatgctgctctgtcggtttggcccagagagaccgactttggaagctgccggtcggaggacgtgctcgctccgccgttcatcgtcctgcgagcgacgaaagggcggttcagtatcccccccgggacgcaagcgggagcgggccacggacggacattcttcagcgcgcgcacgagagtgtggatcggcgtagctgcccgtttgagatggaggaactgcgacgacagcacgtggactggcagggaggtcggatcagcctcagtcccggaggagaactcgttatgaggcgtcactgacgatggtgcacgagttttgggtcggccttaagcagcgcctgtccttcgagcacgtcgaggcggaagcggaaatcctcggcgatggccagcatctcgtcaacgacaacgtcgagcaagctatggaggagcatcgacgggtcctggctcgaccgcaagagcgtccctggggtactcagccgctcgttgatcggaggcagcaggccgttgccgcttcgggagaagatcgagatgaccgtacctgcagggtcgtccggtcagtcaaagcctgctggcactcagcgcaagttccagtgacgcgcctttcgccgtgaggaagatcgacagctgctgcttgcggagcccgaggctcgactgggcgcgaagtcggcgcagcacttcatgagcgactgccgtgggctgagggtttggttgcgaaagaaggcggaagcatcagtcgagcgaaggagagttgagcagcaagagatggacagacatcggccgccttctcatcgtcggcggtcgtcgcgctggccttcgcgttcttcgaccactttggctcctcagtcagcggccggtcctggacattctggaggaccgcgaggtcgtcgctccaacggagcagtctccggcacgcgcgccgaaagcctatgaggcgactgccgtgctcggcagcgtccccgttgccggcctcgtggtcgatctcgtacgtcatgaggcggaggaaaagcatcgagggataccaggtggcctgcagcatggcgagaggggtgaaagagagcagtcgtcagcaagggtcgacaacgctcgaccttcgagagggcaagggtcgacttgcgcttgagcgtgacaaccgcgagatgtggatggcgtcctcgagcgcgagcgggtgcaggtcaaacttggtcgccaatcggtgcagagcgacgccagacaagccattcatgttgatccacgtcgtcttggccggctcggcatcctcgtcaaacgcgtcgagccactccatgagcgcctcggtgtcgaccgccttgaactcgtcgcgctcgacgtcatgctcgccccactgggtgatcgagacatcgagcggcgctgcgaggtgcgccaagttggtccgcgagacgtcgacgccgggctctgcgcccctactcgacgacgcaaagtcgtagtccttggtgacggagcggatcgcctggagcctgcgaacggcccgctggagctttgggaccttgattggggctggagggccgccggcgctgcctcctcttgccagtcccgcgactgccgtcgagccgtaggccagagcgtcggaagccgtctcccgatggtgagctgcaagcagtgacttggtctcctcgtgttgcacttgactgggattcttcatctgcggcgggaagagagcagaggtcaagctcggagcggctgcggagctcgggacagggcgagctggtcgaggggcacaatcttcaagggcgtcgcttctgcgccgtagacgtcgaggtccggctgagaggctgcaagttaacgcacgctgcttgttctcgacgtgtggtctagctagaggtggaagcgatgagtgatggacagccggtcggtcgacagtgcgaggccggtccctctgcgcgcgccagactcagaggtcaagctggcattcgcagtagtatgacggcaacctcctcgcactcgctcggcacgtttgccgcaagtcatgtctcatgggcagcaggttgtacaacagagatcgggaggagggagcaagggtgacagccgaatggaagctggtggtggagacccggtcggccctgagcaagccgaccgtctactgcaggccaaggccgggcgacatcggcggcggcgctttcgaagcgtacgaggctgtcgaggccatcgacggccgacggagcgccggcggcggcggcgggcgcgtgacgggagggagcggggccatgagcggatggggttctgcagcacaggacgaagggagagcgcgtcaaattgggatgaatgcgaagagagcacgatgagctgatggccgcaccgatcgtctcgaccgcgttcttggcctcgagccaggcctccaggttctgtggaatggaaagcgacagtcagtcaggagcgggatgagagcccagctggggagagatcgccggacctgctggcaccagtcgcgatgagccgtcgcgagcgcaagacacatgtcgcgcacgtcggcgaccttctggcgctggaaccggtcgaggtcggcctggatcgtctgcgaggcatacttgaggtcctgctcgacatggtgaagcgcgtcctcgagctgcgagatcgtgtcgcgcgtctttgagatgttgctccgccgcgtcgcctctgggtcgccgtccatcaggccggtgatcgagtggctaagcgcgctcaggaagccatagccgccggacgcgcccgagcttgtcgacttacggtggccgaccgtcgaggacgacacggtcgacgagcccaatctcgacgcgcccgggtccggcctgccgccctctgccagctgctcggcctcctcgtcgtcaagccgacgtcggcccggaatgccagcggccgcaagcgcgccgtcgagacgccgggcctcttcctccgacttttccagttgcgcgaggtactccttcttgatctcgatctggtccatcgcgagctcgtactggaggtgcttctgatgccggtagagaaggagcttcttgaggatcgcgccgaaatgggcatagtcggtcaagggctcggtgaactcggcctcccagcgcgtgagctgtcgtgaccgccaggcagggtttcagcggggcgcaggaattggatacggcatgggacaacttcgccactcacgaggttggtcgtcgacaagtacgtcgcatcgacagcctggcccgtcttctcgatcgcagtcgagagcgagcccgtctcagtcaggctgaagccgttgagcactgccccgagctcggcatagtcgtgcgcgtcctctgtggcgggaccaaaggggtcagtcagcgcggcaccttacttcacccccttgcgggccgagggacgcacctgaccagcgcttgagcacgcggcggttgaccttctccatattcccgctcaagtgcttctcaaacttgctcgtaaacgcctcgctctcgaggaagcgctgatccggcgaccgcagaggctgcgcagccgaggggatcggaagcgaggcataggcagcggacgacgagtggtccgttgggtcgtgagcgggcgcgcggaggttattctttggcaggagagagagtggcggcgagtgcaggatctcgggctaagtggcgggaggaggttaggtgagcagaagtcagcgatcggctagtctcaccttacgccgctctcgacgcacccaagagacgccgccgtcaagaaacttatggaagacggcgtcctggccgaggatcgggtggctggcgacccggttcaggaatgtcccgagcatccgcgtccggcgagcgatcagggcggcatcctcctttgccttgttttgcttgacggcgtattcggtcaccgtcgtcttagacgggatgggcgggacgatcagcgtcggatagagcttagagaggttgagccggagcgactcgaactcggagtatcgccggcgagcctcgaccgtcttgagcgggcggatgggatgggggaagatggagaggtcagcctcgggagaccgggacgaaggcggcgccagatggtcggctgcggagcgagcgagctcgaagcgagccgaggacctagcgagcgagcaggactgacccctgtccggacgacgtagacgatgtagaccgatgacgatccctcctgcgtcttgtacgcatcgatgatctgacggaaggggcgaagcgtcagtcgggctgcggttgagagaggccctgaccgctgatgcgggcggcggctgacggaagggaacggacctcgatcgtgaaggtgtcgccttggaggtagcgagcgatggatgcctgagcgtattcggcctgctggaggttatacgcccggctgtagggcgcctggctcgacgacgcctctgctcgggccgacgtcgagggttgctcggctggcctcggggaagacgacaacgtgcgccgctcagccggaggaggaggcgagggtgggcggtcgactgcctgctggccggcgaagtcctcgtcgtcggctctcgacgaggctggactcgactgctgcgtgaaagggtcgacctctgcgaagccggatggggacgacatggcggactggcaaaggggatggcggtggttggtggtagggttcagcggagatggcggcgagcgagcgagacgccaacggcgtccaccgtcaccggcccgacgacatcgaccctgcaccccgagcctctgtcttcacaaggcagcagtcggctagaggtcagtctcgtgcacgctggtctcgctcgtgatcttactctgtcccagggctgacgtctttgaccgaggatctcgctaccgcagcacgctctctcgcccgcagcttcccctccgacgctctcctcccttcttagcagaatggacgacccgaccggccgaacctctcgcggctactctgtctcggcaagaggcgcctttgactcggtcgactactcgacctctgagccgccgctcgcgctcgatacggcgcttgcgagcgagagccaccggccagcaggcagcagcagcagcagcagtcgggccgccgtgcccgacccgtttgacctcgccgacgacccagacgacgatggctcgcaaccgacgccgacccggaccttctttgctttccgacccgaggccacccgtacgagctcgaggactggctcgcgcgctcagtcgcggacgacctcgcgggcgacgtcgcgagcgggcagcccgcctccgcctgcggggtcagcagcgtcgagagcgcagtcgcggagcacgtcgagggctgcctcgcgccggcagagtgtgagcgagggcccgagtgaaggaggggcgagtcgaccgacgctcgccctgccgcagctgacgtcggcgtacctcttcctgccgctcccgaacgtgagtcgtctcggtccggtggcgcgcaagggggtactcgtgttgaccctcgttccacccccgccgcagacggacccgctcgccaccctcctcagcaagtttgtgccggtccatctccgaccaccccgcgatatcgagggccactacgacggccagacgatcgagcagctcgtcgcagctggcagctggcgggcgctcgcgaggcttgcgcgtgatacggtcgtcacgtgtgatgcagagaacgtcgccctcatctttgacgtacgcctcattgactttcttattcggatccgcaagccccgcgctgactcgattcgggacttgcagatgttccacctccgacacctcgccctgttgcacctccacctcccgagcctgcacgcccgcgagctctccttcctcttccaggcgatcgacgacctgccgccgacactccgcgcactcatcgccgagcgtagcgttattccctttgggcttgaggtcatgctcgcccagacaaagggcgtcgacgccctgaacgggctcgtccggcgctgcaaggtcgccgtcaagcggagcatggccgccgacgagaaaacggtctggcgtgagcggcaacggagggtcggcgtcgtcctcgccggtctgctgatcgatctcggggtgagtctggcttcttcttcgcggatggacggccactcgctgacctgtttctccctccaggaatcggttgccgctctgcacctgctcgcacccctcgcacagtcgccctcagcgccggcttacgttctcatcgcactccaccgcctccatctcctcatcggtgacgtctcggccgcgagccgcgtccgcgagcggatcgacgcgcttgcaggcgccagtgcgagcgaaaaggcggttgctggcgcgctcgagagcctggcaaggggcgagtgggaggcggcgggtgctgggctggctggcgtcttgcagaacacgccgcctgactcgacggaggccctcgtcgtacgttcagtctgttatcccgcctggagggatggcccgaatctttgtgctgaacctcgcgccaattttaaggccgcaacgacactctccgtctcgcagctttacgagagcagccctgatgtggcgattgcgacgctcgagggggccatcgccgcctcgccctcggccacgctgatcgagcccctcatcttcaacgtcacgacgctgtacgagctgcgactgagcgcagccgcggccatggagaagaagattgacctgctcgtcaaggtgaagcatgaccggcccgcgcaaagtcgctcgcgacgtcgactgacagcctgcttcaactctcttctcgacaggtcgcgcagtgggaaggcgacggcttgcgggtgagctccccttcctccgctctgttgagcgaggctccgtcactgacaccgcgtccatttgctcccattgcagccggcgtgcctgaagctcgtctgagcggcgcggaactttttgcgatgcaactttctttccttctcgagtcgaagcatgatacgatggtagaccatcaatcaggccggagccgcatcgacggtcagccgtgacggcgaaagggcgcagtgctgagggcgtgctaggtccgacggtgtagagggcgtgacttggtcgctcgattgggcagccggttgtttggcggggtcaccgctgcgactttgaaagcacgagtgtgctgcccgcgcggacgatggaccgcagacaggttagccaggcgagtgggcccggccgttcgccgaccggttagaggttggccgcaaaggagagcgtgctcgaaaagagcgatgacacatccacaggatagttgccgacgatgccacactagaactctgtgaagccgccgccctggctgtgtatggccgagtaggtgctccggccgtcgtcgtcacctgcgtccgacttgtagaggctgccgaggtcgctctggctcatcgagctgatcgagagccgccgccggagccggtccgactgcgaaaaggcaatgctcgacggcacagacagctcggacgacgcccggcccgactcgccgccggcgaggacgctggcagagtcggcgatcgagctcgcgtcgcccccgccgttgacgtcctgcgaaatgatggacgaggcgtacgacgagtacgtctggttggccttgcggccgccgcccatgcctgattgggcaaacgggcccgaggcggcgtgcgacgaaaagagggggatgctcgaggccgtattgtaagtcgcctgtgacttgagcgactgcgcgtccgaggggatgtacgagagcgggtcgtgtgtccggtagaaggacgaatcgaaacggctcggggcggcgccgcgctgggctgacagacggcgagagggaccggcgaagcagcaggtcagcaacgtgctccactggcaactcgtcgcacgaagggaacgcacgcggcgtgacggtgctgccgctgttgatgagctcgccggtgtgggcgtcaaacttgcggaactggtccatcgccttctcgagcgtccggcgcggcttgctaaactggatcaagctcggctgcaggttgctgagcgggccctcgacgaggcaggatcgctccttgtagtgtgagagcaggaagtgccagagcgggtgctagagtggggtaagaggcgagcgccagcattagcaggaagcattcacggcgacccgagcccgactagcttgcaggcgacgcaccttgctcagaaccttgggattgccgaggatgacgacgccgtatttggctcgggtaagggcgacgttgagccggcgggggtcgctcaggaagccaatgccctggtgctcgttgctccggacgcaactaaggatgatgtagtccttctcgcggccctgaaaggcgtcgaccgaggcgacctcgacctccttgtagagctcctttttgagcgcgccgctgaactgcatgtagttgacgacatacgaccgctggccctcgtaaggcgtgatgacgccgatctgggagggcaggacgcccgacttgaagaatttggtgacaatcttctcgacgttggaagcctcggtccggttaaggaacgacgtgccgctcgccgaaatctcctcggtgccgaggttctggtagaacatcatcggcgtgtcggcgaccggccagggaaagtcgacattcttgcgcagccgctcgggcgccgtcacaccattctggagcgtgccctcgtaaaacatgttgctcgggaactcggacaggcacgggtgcatccggtactggacctggagccggatcggccggttgccgaggatgatgagccgctcaaagagcgactgcgagagaccggcccgggccgccttcttattcatgatgacgggtccaagttgctgcacagtggggccgggggtgggtcagcaagcgcgaagggacgacgagcggctgagcgcaagacgacgcacctggtgatcaccgacgaggacggcctgcttgcagccgaggacaagcgggatcatgcactctggctcggcggcctgggtcgcctcatcgatgaggacggtgcggaacttgaacttggcgagtcgagggtcgcccgtgccgacgcaggtgcagcagatgacgtcggcggcgttgagaatctccttctcgcacgccttgacgagactcttgtacttgcgctcgtcgctctggctgagctcaccctggctctccttaagctgaatgagcttctgtagctccgtgtgcgtctcggcgttggcgacctgctcgtgcagcgtcaggaacgagatgcccgagtcgagcgcctcgcgcgacttggccgtgatccggacgaccttgaggccggtcgcgtgaatcttctctgttagctgatcgacggcgacgttcgacggcgcgcagacgagcacctggcccgggttcatcttggcgaggtggtagacgatcgaggccgacgtgaccgtcttgccggtgccgggcgggccctggatcaggctcagcggcttctggaggacgctcttgacggcagccatctgcgagtggttgagctcaggcagacccggcgcagagaagcgcttcggcatctgcgtccgcaggacctgcggctcgagctcgtggcccagcagcttgtggtactgaaagaggtgtgtccgagctctgcatcagcgatgcgctgccaaagctgtcgagcagaaggaaagcaacagtggacgcacgatgtagccgctgacgctgcgctcgtcgacggcaaatgtcttcatcgcgtgctgcatccggtcgaacgaggtcgacttccagacaaagtcggccgagaagccgtgcgtgcagtcggtcggcacgccgtccgagcgacggagctccaagccaatctcgtcgctgacgtctgttcaggagagcccgacgggtgtgaacagaaggcacacgctgcacctccaggaggcccgacgcactgttggggatcttgatgacgttgccgacgccgtcccagtcgccgcccttgaagccgccgccgttgagcttgagccggagctcgtcgccgaccgcgagccggacctcgccgctctcgagcttgggcatgccaaaccaggcgacacgcttctggttcaggccgacgtcccagcggacgatgatgtcgttctgcgtctgcgactccttaacctttttgtcgtagtcggcctcgatcttgacgagcgggccaaaaatgttctggtactggtaggcgtcctcgtacctggttgagccgtgcggcaagcatcagctggtgaaggacggcagtagagacagccaggagaggaccgacttgagcaagatcggctgcggctcctcgtcgacgccagcgcggccgatgtcctcgagttcggcgttcggatcgtccttccacatctcctcgagcttgttgatctggtggaagctgatctggcgcgcgcgcagctgctcttgctcggacggcaccttgacgagccacgagaggaacgaccggtcgtcgatgatggccgaccactgcgacgtgtcccagacgatgtccttggacgaggtcatggccgcgcagggctggcggcagagcaggacgacgaccgtgtcgctcttggccggaatgaagccgagcataaagacattcttgctgccgcagttgtagcactcgggcgtcgtctcgccgagtggcgactctgcatgtaggacgacctcgcggtgcttggcccggacgaggtggttgacaatgtgcgaggccgacgtcgtcccgcgagcattgcagaaccacttgttgcagaggaggcactggcagaggcgaagaggggctcgatcagctgccggcccggtcagcgcggggccaaggagcaaccgaccttgacgacgcaggatgggttgtggatgccgcagtagctgcaggggcgcgatcaaaggtcaggatgagctcaagctggtcggaggcgctcgcgccgcgaggacggacctgcacgcgtgctcgacgaggccgccgtcgagcttgagatcctcgaggacgccgtcgaggtcgtcgtcgagctcctgggaagcgcttgcctgggcagcgtagccggcgtgatcaaagtcctggtgcgaagggtgctggtggccgccgtgcgcgtacgcgtgatgatgctggtgctggctggcgtagtggttgacctgctgctcggcgtaggacgcgcccgagagcgaggccgtgtcggtggccgaggacggaccgcgcgagggcgcgtggctgctgccgttgccgggcccggttgtcgtcgtcagagacgagtagaccgaggcgccgtcatcgaggccgtactggatggaagggaggtcgcgcagaaggcaaggggcgatcggaggggagaggggcggaagggagagagagggcgttcagcgccggtgctgcagacagagcggcacacggaccaagatcctggcagcggttgtgagccgtacctgcgacgcgccttcgaacgcttcaaactggtccatcgcttcgcgttcaagagggatgggcagggacgaggtggcggactccgagggcgacgacggctgacgcgcgcgcggggtgattcctgaatggccggcgagccggtcggcttcaacaattgagtcgccctggcagcgccacgagacccttcttttcgccccgccgcaggtcgctacaaagaggagcgaggccgccgggccaggagattaaccctctacgactctccctcccggcccgacctgaccccctcattgcggctcgtcttgagcttagctccgaggggcaggggaagggtctcctcaaccaccgcggaggcacctccctttggggggtggcgcctgtcgaacggcgccgagtcgcagagcaactgccctcaggaagcttcgttaatccccctctgaggacctccacctcctagggattcatttgccaaccacatgcccttctccgctgttcttttcatcctacgatatcatgttgcctggcgccaaattacccgccagctcccgcagacagcgagcgccgcgcagcagccagcagcagtcgaccctacctcagatcccttagcaatccacagagcttgcccggatacgattgaagagaagagcgcatgccatgttctagaaagggacacggcggcgagctctagatattgctcgccctagatggagaggtcgtgagggatgtcatggcggcggtcgggccagaggcgactgggcaggcgcgtcgcgtcgggtctaaagttcccaaacgcggagcgaaggatgcaagggactaaggaggcagatacacgtgagatgagagaagggcgacggggtcaagcaagaggggaccgacaagcgtctagtcccacttgtcgagcttcatcgtgtccttctccatgaactggagggagcaagggagcgagtgcccgggtcagcttcggtgcacggcccggcaagcaaagagcaggcaggcgacgaacgttggtgtgcatcttgaaggcgttgcggagcatgtgcggctcgtgcgccatgcccttggcgaggcactcgtgcagcgcccggtcaaagtactcgtgcagctggttcctgtaatctgcgggaaggacaggcagcggcggcgacagggacagtcagcacatgtgcaaaaaagcgagcaaagaaagatatggagtgaacaaaccagggtgcgcgcacttctcgatgatgagcgggaagcggtcgcgcgggcagaggccgcggacgtcggccaggccctgctcagtgacgacgacgtcgatgtcgtgctcggtgtggtcgatgtgggaggccatcgggacgatgcacgagatgccggtcgggtccgacttggacggccgcgacgagggcgtgtgcatgatgctgatggcagcgttgcggaggaagtcgcccgagccgccgaggccgttgagcatccgggagccgagcgcgcacgtgctgttggcgtgggcgtagccgtcgacctcgaccggcgtgttcattgcaatgacgccaagccggcggatgatctcgggcgagttggcaacctgctgcgagcggagcagcagccggttttcgtaatcgtgcctgagaacaaaacgcgacaggttgtcagcgcgccgtctcgcagagcgagcaggaggaacgggacaaaccagttcgcgtagaatttctcgaatccctcgggcgagaagcggatcgacgtcgccgaggcaaaggccagcttctgcgagtcaaagaagtcgaggaaggtgtcctggaggacctcggtccaaacgttgacctggtcaaacggaccctttgcgaggccacctgtcgagagtcgtggaaggtcagcatgcggccgccatcgagggggggggggtatcgaatcaacggaccgatgatggcattggcaacgttgccgatgcctgactgaagcggcaggagcgacttggggatccggccagacgcgacctcggcctcgaggaactggataatgttgttggcgatggcctgcgaggtcgcgtcggcgggtgcattgccacccgtgttgtcgggctcctggctttcgatgacggcgacgacttttgccgggtcgattgcgatcgactgagtgccgatccggtccgagggcttggtgatcaggtagggttgccggtgaggcgggaggaaggactggctgaaggaggccgaggggtcgtcagcgcagagacagggcgctacatgcgcagagaggcaggaccgacttgatgtcgtgcaggcccttgaacgacggcagcttcgtgttgacctcaatgataatcttgtcggccatctgcaagatctcgggcgtcgcaccgaccgaggcaccggggctggagtcaagggcgtcagtcagagcgctgaacatcgggtgggtcgggcccgagagacgcacatgatgctgccgtcggcgagaacttcggtcgcctcgatgatggcccagtccagcttgccaccctttttgtccttcgtgtagaagccgtaggtcaggtcctgagggaacatcgagaggtgcttgtcggcgaagcggatgcgaccctcgttgatgcctttagagatgttcttgccgacctggatggatcgtaagcgaagtgatcagtcacgaggaggacggggagaaagtgagaggagacagagattggcaccgacctggtgagggtaccgccggtcgatcatgtcgagcttggcccagcggtcctcgacctcggggccggtcgaagcgccgacgaagaggttgaacttcatggcgccctggaggccattcttctcgacgtggtcggcctacgggaacgacgggccgtcagcgctgagcaagtgaatgttctagatggccgacgtacgagcgcggcaggcgtcttcttcgggtagccaacacctgtgaacctggacaaaggaggccggcgcctgtcagtcgatgggctcaggctgcgaccgtttggcttggacgcacccgctccatccgacataatctgcaatgcaagagagccagaggtagggtcaggtcctgcacgatgcgccagccagcagcacctttaggtcgagcggaggccgagttacggcatcctgcgcgcggcccggacgaccgctggggcgcgcccggtcaaaggggcggcgagggtccggaccgacctccgttcttgaagagcgatacaagctcgctcgcgcacgggacgaccttgttgaggtacgacggccgcgcaacgcgttgtctgagggctgcagagaccatggctgctgtgggacgagtttggtggggaagggaggaggtgacggtcggcagggaagacgcgcgcgcgcgactgtcggaggcggaattcgaaaggcggatcggaagggccggccaagtgccgctgctctggtggtgcaactgtactgggctgaacggagggcgagactgacgggaggcgttcgagagaggcagccgagagatggtcaacccctgctggcccttttgaagaagagcatcgatcgttcccccgtagtggaggacggcctcggtcgggccggacagcagcgattacgcgctcaacccgcgccccgctcggctcacgactttgcccgagcgtcgtctcgctcgacgcttcctagactttccgagcatcgtcgcccgccagtcaacgcagccttgagccgacaactctcggagcgcttgccgagagactagacgtcgatcgctccgacccgagttgactctactccgtcgacgtcgggtcgggcgcagcgcgtcagacccgcgtacgtaagacgcacacttgccgatcggccgtcccccggttggtccagttggcggagcactgacaaggtctgacccctgctcgctgcaaatagtctgcctcggcgtgcatgcggtcgctcgaggcgcgggcatgcgctcttgatcacagccgcgacccgttccacaacatgccttcggcctggcgacgatgcaaaatcgtattcgagcagtacataaaagacagcagtacagaagacgtgagtgcaggggacgaaggggtgccggctggcctagttctgggcgaggaagccgctgagggcgccgccgacgttggtcgtgtcgatgaggaacgtgtcgtggccccagacgccgccgagctcaaagtatgagacgttgccgttgccggccatccggagggcctctgcgaaatcgcgctgctggtcgaccgggaagaggatgtcggactggacgccaaggacgagcgtcggaatgtcgcgcaggtttgagaggcccttggcgaggtcgtcgaggaatggcgcgtgcgacgtgatgagatgctggcgcggggccggacgagccggctcggtactggccgagaacgataacgtcggaccgctcggcggcggcggcgggtagaggccgtcaaagtgctttcgccgctgggcgagcggctcgagggccgaggccgtcatgtcaaaaaggtccatcgccttggagacgtagatgaacgagttggcgtcgtacttgaggcaccactgctcgccctggtggtcaaggtaggtctcaatcaggaagtcagggcagagcgccggcggcttgagcgagaccgagccgtcggcctcgggctcctgcgaccgcattcgccggccaaagcgctgctcccattcgggccctgagcgataggtgatcgtggcgatctctggagtcgggagggtggcctgaaggggtcagctggctgcgacgctgcagtcggtcgtccgagccgttcgagtacgcacggcgggcgagcttcatgccagcatgcggcggcagggcgtcgtagtagaagccacggttccagttggggtcggccatgagcactgggacagggcgaggcagcgtcagcagtctggccgagactagcgacgaggcaggggcaaagacgcaccgctgcgctgcgcgaaccggagggcgacgcccgtcaggcccgacctggccgttcccgagatcgatgcgagcttgccgacctagaggtggaaggggcgggtcagttggcagcacgattggatgtagggcagccaggacgcacccgccccggatagaggtggccggacgcgatcgagagcatgccgcccatgctcgcgccgaccgaagcgtagagccggtcgatgccgagactgtcgagcaccttgaatgaagcgttgaccatgtcaaagatcgagatgaccgggaagcggctcgcccagcgctcgacgccctcgccttcgatgccgctcccggcagggatgacgctcgccgggccggtcgagccatagcagccgccgagggcgttgcagcagacgacaaagtacttgttggtgtcgagcgccttgcccgggccgataaacttctcccaccagcccggagcagggttcgcctcagtcgaggcagcatgcgacgaggccgacaggccagtgtggagcaggatcgcgttcgaccggtcggcgttgagcgtcccccaagtctcgtaggcgatcgtgaaggacggcagcggcggggcgtacgtcagagggagcgggccgtcgtgcgtgtaagtttggtacatcgatggcgtcggcgcctatgtgcgcgagaagagccctgtcagccggaagcgagacgaaggggcgacagtggctcgcggcctcgtacgcacagagtacgacggctcctcgccctttggatcctcctggaccccgagctcggggaagctcgacgcgagcggctcgcggcgccggcggagaggcgtccccctggcctcggcctgctggacgagacgcgactcgcgctgctcgtgggcgtcgatgcaagggaaggacgggttgaagcgcgtgaaggccgcagacgacgacgacgaggcgaccggctgctgctgctgttggacgactggagcagctgcggtggcggcggcgaacgaccgggccgaaggtgtcgtcgccaggtgcttcaggggcgggacggccagccggcgacggctctggcgcagggacgactgcatcgtgacggtcggagggaggatgggaggagggcggagctgtgctggaagagaggtgctgcgtggcctggcgtcaagggagaccgtctgcgagctgcaacgagtaggcttggtgtgcgatggatgaccgacgggcgaagaaggtgtggcgggacgagtgcagcacgtcgtcgaggcggcctgcaggcgggtctcgtcagtctccccgaaagtgccccttgcttcgtcaggctgggctcatcgatcgcccgccccgcatgtcgtgctttggacaagcgtgggaaccagcgccggtccgcgcaacgtacgtacggcggctctgcgctgccacatgtggaaggcccggcagaccaagggcaagttcaattcatgaagcgaagaggggctcggcaggaagaacttggcttcaggatcagagcaaggacaagagcgtcgatggcaaacgttgtccatcggtgcctgcgggccgtcgaaatgcccggacgccgtaatttggtcgaacatgcagagggagacctgatctcctaagtagaaggccatgaagagctcagagcgaggacggcctcgaaggaggggcaggtcgtgtggtcgggctatcgacagtcttctcgtggcccggctcctttgcgcggcgacttacgtaaccagctttcggcgccagaacttcgcgcgtctctccgcagcgaccccgaaccgaacctcgacgacgacgcctctccctgacccttgcgagcagctctcacgccttggccctccagcctctcctacctcctcgctagcttcgtctcttccactcttctcgccgccacctcgctcgctcgttcaccatgtccgcagcctcgtcagccaagctcatcggctcgctcctcttctgcccggtctgctcgaccctgcttgacctgccgggcgacaaggacgtcatcgtctgcgagcagtgcaaccacgaggagcccgcccagtgtgcgttctcttctctcctccaggtcacacatgcagttacgaagctggactgaccgggcttcgcctcccctcctggtcgctcgcccccccgtccgcccgccttcacgccaacctcagcatacgagaatctcggcgtcaaaacattctcaaacccgtcggccttcccgtcagcgctcaaggccaagcgggcacttgtcgtcaaggccgaggacgaggagcaggagagcgctctcccggtcgtgcgtgacctttcctccctcctgcagctccctcctgcagctcaattcggcgagcgcgtgtctccgggcacgcctgtgctcctgcttttgctccctgagctgacttttatccccgatgtgctacctctcggctcctcaccgcaggtagacgagaagtgcgagaactgcggtcacattggcctctcatacaaggacctccagctgcggtcggccgacgagggctcgacaaccttctacacggtgcgtccggcccctttgcgcccagacccgcttccgccacggctccactgctgctacggccagcgtcccttgcggctcatatacgatttcaaactgcacctagtggttctgcgtcgctgacccgtcctccacccccgccgctgtcaacagtgccttggctgcggccaccggagtcgactcaacaactagaccctgccgacgagtcctccttgtcgtccggagggcagaggggctgtcctcctgcgtagagagtcgcaagatcacatgttgtaacgatcgcaacagaagctgcgggactgtcgccgggagagcttgggaagaacaagcgtcatggagagacatataagcgctcgagcaaggcatgaggtcacgggcagtaatgcaaatgaagaagatgatgtgcgaagcgttgtgaggggctagtgaggagtggccgaggggaggatgcggtcgacagacgtctaggctgcgcggacgagcgacctgcacggcgcggaagatgcgagcgcccgcaagaagcaccacgtctttgactattgtagtccagcttaggcccttcctcgccgtcgctcggcctgagcggcgaaagcgaccgagtgaggtctaggacggtagggcgagcgtgcggcggcgggatcctccgcattggctatagcgacgtcttgaccgacccagggccgtcgatgcccgctggcggggcgatgagcgggttttcctcgcgcgccgtcgtcaggagcggcagcaggtccttcttcttgacggctttctgtgagagagaaacgaccggcagaggtcgtcagcgtcggccgtcggcacgcgtacgctttgtgcagcctccgacgacctcggtcagcagacccccggcagtcgaccgcctcaggcggccgagagtgagggtccgctcaagccacaagcacaagtggacgtacccagacgcagctgctgtactctcgccagctctcgccgcagaggctctcgtactcggccgcctttgccttggctcgcgcctgctgctccgccggcgagctcgcggcgccgctgccagtcggcggctcaaggtagccttcgatccacttgatgaagcaggcgtcataccgatgcttgagcgggttgcaggcggggtcgactgcatgagggaaagaagtgggtcagttctcagggtcgaggactgaagagctctcaaggagagagaggggccgactcgagctgagcaaccaagcaaggagagacacggagcgtcagtaccctgtctgcccatcgactacagcggctgttgacgtactccatgcttgcctgtatgtcggctacgggcaataggtggaagccgagataggtctggagttgggtcaagagagcagatgtcgacggtcgaggagggcagagggacatcagctggcggcgctgcggtcaaatgcggccggcttcgttcgattggcccactctctgatcgagctacaaactggatcgcagtcacgcggaagtcgacactctgcgcgactgacttcgctcgcaatctaccagaggccgtcgtcccctctccaacgacatccccctcgtctcgcccctccctgcgtcccatctacaaggtcgcacgcccgtctgctcgtttctctccaccgcgtgactcgcagctcgctcgaccgtctccgccccttctgggctcgagcgcttcccctccacctgggctcggatcgactgccgaccgcacctgccgggctgagctgctgcctggacgccgtcgcccatgcgagccttctttgcccgtctcggtggaccgtccgggtcgggccatgctaaaggcaaggacggaaaggcacgctcagctgtccgggagaagattcgagacgagcagggcgaaggcgcaggcgcccctcgagctgtagcttcctcggttgacgttcccttgccggcccaggttgtagcatcggccgcttcacctgcgtcccggcagccgacgctcctaccgccactgtctctgctagacagcatcccgctcagctcggcgctcgatgcctcccagctcgaggcggtgtcgagcgagcgctctagccttctgctacgcgctgcgcctctgcctcctcaatcgcccccgccggaggcgacgaccggcccgctagagacaagcagcagtatctcgggcttggctccaaggccagatcctacggatcggcacgagaccaaagcgaccagcgcgtcgtccgtgagacccgctgagtcgggcgcaaacgtggcggctgggcttggactgctttcctcaacggcaggcgagagccgcaaggtcgagaagacggtcgtcttcacgacaccagcctcgcccgagcctgctctggcactgacgggcgaacccatcatcacacggcttcctccggtcagtgaggaaggccgtaccttgacggtgtcgctggcggccggttcaccggcgctgccaacgacgacgacaacaggcggccgctcgaaattggagcctaccgccggtcgcacacgcgcctcgtctgctaggccggccgataccatcagcaaagggccatcagccacgaccttacgcattaagaagggctcaaccccgacgcatgcaggcgtgtccagctcgacgctgcaagccgttgcgtcgcgcagctcctcctacatcgctccgcctccaacgacacggtcgctctcggcccagaccacgagcagtcaggcggcccgtctccggaggccagagctgagccgcccgctgagcgccatgtccgactcgtcggccttgacggggacgaccggtggcggcggcgggagcagctacatcggctcgcacagcaactggagccagtgggccgacgaggacctgctcatgaatctcggtcctcgcgaacgaacgcgccaggaggtgctctgggaaattgtctcgagcgaggagcggtacgtctcctgtccctcgcactgtacatggcgagaagctgactttcgaacctctacccgccacagctacgtcgtcgatctgcagggtctcgtctctactttcatctcgtcgctcttaccgccaccgccagtcggctcgcccaccctggacgagtggacgcctccgctcggcaccatctcgtcggcaacgtcggcgacgtggtcaagccctggaagctcggcgaccgccgacgcatcacccaagtcggcagcccgcaacgtctctgccgagtcgtccgacctgctgccgattgccgctcgcttccagcagtcgaccttcctcggccgccacgactctggcaggagcagtgacggcgggagtggcgcaggctcgccggccccggccttcggcacgcatgagttcgactcgttcgcgatgacgagcgcgaagcctttcctctacgacacactacaccggccgcacccgctcggccagctcaagccgatcgacgtcccgttcccggacggaccaagccccaccagcggcggcgatcgccgggctgcgccaacgttgcactcgcaccaatcgctgccaccatcgactcgagcgagcttgcggccagcttcatcctatcatccagagccgcagcggcgcctcgtctcagccgacgccgcctggaacgtgtccaagcataagccactgcccgcctcaccaccggccccgcccgtcggcgctgcgagaccaggcgccgccgccttcaccgctcaagcagatgtccttggtttgccggaggacttccgagtgctccttgaggtcctccgagatggtatcctacccggccacctcgccctcagtcgggcgttgcgggcgcggcatgcagagcagttcccgctcgttcgctcgctcgcagacgtcttcaacgcacacgtgagtcttcacgtctggcaaagcaacctgcctccccaccgaggatgctgaccgtcttgaaactcagtcctacgtcttgcgcgagtacaacacgtgagtcggatcacagctcgggcaacccgcgtccaggctcgcctgactgaaaatttgacgcccacatttgcagctacgtccttcatctctcggatgcgctcggcatggtcgacgcggcgctcacttctgacgctggtttagtcggcaagaaggcagcgagaaaggtcgtcgagaacggcgaggttgtgcgtcttcgcaaggtcttccaggttggtcgcgcccgcttcgtccgcgttagcagacgacaagtcgacgtactgacctgacgatgcttgcacccgctcaggagctcgacgagctggccgccgacaagggcgaaagcggcctcgccatctcgctctccaagccgttccaacggctcctcaagtatccgctccttctgcagaacctcctcttcgtgagctccaccccctagccatgtcctctgctatcgctcaccacccaccttgacccgcaccatagcacaccgacccgtcgacaaaggagtatgaggcgacgcttggcatggtcgaagacgtcgaggccatcatccgctcgatcgaagacgagaagacggcagtcgacgaccggatccggacccgtgacgctttcgcccggatcgacggcctggaccgggagaaggcaagtcggcgtgctcatgagtctcgcagcttgtctctgacatctcggccgctcttttgcagatgcttatggcacctgcaccgagccggctcctgcaggaagagttcccgaccgggcctgacggagcacggttgacggcacctgctgccgctcgccgacaacttccgatgaaggccaaggagaagaaggtctcgcgtcgtctgagcgagatgctaaagccgacggcaggtgcgccctcggacctttggatcgtgtacgttgcacagcttgcagtccggccactcgccgtctcttccaactgaccggagtttctgcgatcagttgtttctcggacgtctctctcctctgccaacgcacagggacgacgaccttgccgctcgctgcgacgacgactcgatcggcgtcgctgcccgacctccacggcaaagccaagtttgcgaccgtcagcggccgtcggacccagcagcagccccgtaacctatacaaggttcgtctctttcgttccgtgcatctgcgatctagcgcctgacttcagctctcctcggcagctcgtgcgcatctttgagtgggccgcaccggtcgaccagagtccgtcaaaccaacgttggaacgacgagtgcgtgcagggccatttgccctgcccaattgcgcgcaagctaatgtttgccgaacacctaccgcgccatcaggacgactatcggtcgggcgaccggtcaaacccgacgcccgttggcgacgccagacgagcccgtcgtcgacgaggatgcggagctcgacagcgacgactcgtttgacgccaagagccgcatgtcattcaactaccagtgcgtccctattctaccacggatcgcggcgaccgcgtcgtgcgaggttaaccagtctttggctgttctacacagggctggcgatgtggttgagccggcgcctcccttgcccaccggacgtgcgaccgcagcctccgccaggcgggccggcgcggcctcgagcctatctcaagcctccaaggtcggcacaactgccacaacggacgccgcacgccggtcgtcgggccaggagaaatttgggtccagactccggtcgcccgaaccacccgtggcgcccaccggtgctcgtgtatcgagtcgcgctcgggccgctgcgccgagctctacgaccaaacgagcattgacgcctgccgctcgaccgtgcgtacctctcccatcacgcgctgcgtcgcctctctgcgcgctgctgaccgctcgcccattcgtctcttccagtgcctggaattcgaacgttactgctgcaccgatcaagccgcggacgccatcggccacccaactcaagctggccggtcccgtatcggcggccaagaagtcgccgacgccgtccgaggacattgcgtcgctctaccggtcgtcacgcaaggccgcgtaaggaggccgaagggtcgcctctctctctccctcctcttcgatctccatccttacatcaacaacatcaatcccggacacgaacgcctccttggcgcccttccttcactacctcgctacgcccgacccttcctaactcgcctgctgcaacgccgcaagtaacgacagtacccttgctttgcctcgataccccccgccccttcggtcctgcacttgctcgccagcccatcgcacctgcccctttcaaattttcacgaatactcgacgaccctgcactttggaatgctctgttgcctcacgtttcaacctcctcaggagtttgcgtcccgtcgatcgctccgttccctttcggccgcgctgccggcacccggccgagcgccttctgcgtcaccgccggatcggctctccttccgaccttcacctcctcccctttcctgtctgctcgcccttacccctctagatatggtcaagtcgtacctgtacgcgttctcgcgcttctacaactcgaactttgagcgcgcgccgggcgtcacgcttgccctcaccaacggcgcgctctcgggcgtcgcggacgtcgtcgtgcgtcctcctgcccgcgcctatcggccggccctctcagtacctcctaattgctgaccgagctcgttctgcctgacttcgcaggcccagtcgacccagatctttgtcagtttgctggccttcctcgctttgctgtcggtgttcgggagcgcatagctgtagcagcaacagctgagctgccgacgacctcctgcgcgcgcctccctcctctgacactccctttcctcatctctgcagttcctcgaggatgcggctgcgagcgggagccgaacaccgtacgacccggcacggacattgcgctttgttgcctttggcgtcggcatgggaccgatcagtgagtcgcatcggagagacgaccattggcctgagctctggatccacagctgacgagccgttcgacctgatcacttagtcggcaggtggaacaacgtgagctcagcgctcgccctccgcctggattcggcgaacgagaagctgagctccctcggctttcgttcttgcagatcctcgagcggaacttcccccttcgagcggccgcccggtcgctgaacccctcgcccgcagtaccttcgcgtgcggccgccgctcgggcaggaatagctgtcccgccagcagcagcggcggcccagcccaaagtctcgctcgcagcgctcggtaagcgtgtcctcgccgatcaagtcgtcatggcgccgttcggcctcgtgctgtttattgggagcatgggcgtcatggagggccggacgacggaggacctgaaggagaagtaccaggatgtgcgtcttctcgaatgcgagtccgtcagcgcatgaatgatatgacactgacacgagtccttcctgtgttggcagatgttcatcccggccatccttgccaactggacagtctggccgttcatccagctcgtgaacttccgctttatgccgctcgcctatcgcgtacgccttgccccttctgtgcgagcgccttctccctcactgacccttctaacccgccctctatgccctcacaggtgccgttccagagctcttgcggagtcctctggacgctctatctgtcaattctcaactcgaacaagggcggagccaaggccgagtgaggccgcgtaccaggccaggcaatctggctgccggtgacgggaccgccaagagcgcgcctcgttggtcgagcagcagccgacctcctgccttccctcgacaccaccaacgtctctccctctctccatcgacctctaccttagtcgtcctttctttctcactctcttcgcaccctcgctctccgaggttcccaaccaggcttcgacagcaacaaatccaccggctcgacaccgccccctgcccttcaccccctctcgccacaacgcaccgcgcctcgtacccctttaaagagcagagatatgacttgtgcgagagccgtgcaatttccagaaggcgcaaacgggaaatctgctcgacgtgtttctaaagagcgaggccgcagaaaggagcggggaagggaagaaatggaaagaggcgcaatgacgtgcgaatccgcaaggagcggtggcgtgcaaaggaaggagggaatgaagcggaacagaagctggcggaggggttatgctggccgagagagcgaggtggtccgtcagggaaggagggtgagacgttcgatgaacgtgggttgcttagagcagagcgaaggcaccggcgacgaggacggcaagcgcgcccgatggggcgtactgggcgaaggcgcccgagccgggcgcagcggccgcgccgaccgaggactgggccgcctgggcgccggtcgaggccgagctggcggcaccggcggcaccagacgaggcgctggcgacggcgccccccgacgaggtcatcgacgcgccagggagagcctggctgccggtgacctcgcccgaggtctcggtcgagttgccaaagatgaagttctgggccgtctcgaggtaagactcgccgatcgaccggccgtggcactcctggaccgacttgagcgacagagttgggttggtgcgcgagagggcgttggggaggatgtggtagacggcaaggtcgacagtggtcggatacaggtcttggggcgggaaaggtgcgaggcaaggtcaggatcggcggatcagagatcgagcgcaaggccgacgacgcaccgtgctcgagcgagatgaagccgttgtcgatcttgcccaggttggtgtcgaggaaggcggtccactgcgagaaggcctcggtggcgttcatgaggccggccgcgacgtcaaagtcctgggtgtcgaagaggagctcgttgttgtcgccgacgccagtccacatgacggcctgaaggttcatctgggcggcgatggcgcgaacacggctgtcgatgtctccctctgcatcgatgataggaggggcggggtcagacctaggacaactgcggttcgggcagactcctgtgacgcacgaggggggcggaaggtgagagtcgtgacgccggtaacgtccttaatgagcttgcgagtccagccgagctcggcgacaatctgctcgttggtgagcgtcgtcaggggcgggtgcgaccaggtgtggccgccgagctcgtggccgtcaatgtgctcctggcggagaatgtcgggctggccgagcgcacgcgagccaatgacgtaaaaggtggccttgaggttgttgtcaccgaggtagtcgagcagaatgggcgtgttgaccgacggtccgtcgtcaaaggtcaggccccaggtgtccttctcggagcactcgacgatgtcggtcttgtccgtgcactggccctgcgggagagaagggttcgaagagcgttagccgctgaccagtctgcaacgagtgtaagaccatgaggacgggggacgtacacacgaccaccagctgttgatgggcaaggcgagcgagtcagcgctttggtcttttgtcggcaacgcgcggcgcagcaacaaaaaaagagcaaacgcaccagcggtccttgtcggccgcgccggcggcgttgacggtgcaaaggctctcgccggagttggcgacgttgggcgagtaggtcgggacctgcacagacgagacgacgtttagcccatccgtctggacgaggaggaaggcagcgtcgcgcccgggcggccgagacgcgtcgcgggcaaaaagcaaaccggcgcaccttggtccagtcgatggcggcgacccaggccttgacctcgtcagagtcggtcggcggggtgacgtccatcgacgggtaggcgccgggcgtgtacgaccctgcagacggcaagcaaggcgaaaaaaagtcagtctcgctgctcttgcagggagggaagcaaggacgagcggcgggccgctggaaatagcaagcaagggacccgcgcgcgcgccgcctgcacgagcatgcaggggccgccttccctcgccataacaggaacaaaggacggacattgggggagcgtaggcgcgttggtgatggccggctgctggccagcggtcggcgtcgccggcagcgggaccgagacggtgagcatcgaggcaaagatgctctcgagcgggacgctcgacggcggggccgtcgccgcgacgatgccgccgaccggagcgaccgtcggcgagggctggtcctggcggcgcatcatgttgccggcaggacggtagttcttgccagcacaggcctggacgccggcagcggcgaccgagacggcgaggagggtctggaggacggccatggtttttccgagggaggcgcggtgtgttgtggtgagagggggtgaagggcagggggcggtgtcgagccggtggatttgttgctgtcgaagcctggttgggaacctcggagagcgagggtgcgaagagagtgagaaagaaaggacgactaaggtagaggtcgatggagagagggagagacgttggtggtgtcgagggaaggcaggaggtcggctgctgctcgaccaacgaggcgcgctcttggcggtcccgtcaccggcagcggcgcgccgacgaccgccgccgcttccgggctacatcaagccggaggccagatcgcctggtcccggcaagacccgagcatggacatagtctcggagctcacacctgtcacatttctatgcctgcgaagcctgtcgcagggaggtggaaggtcggcaagcagcgatggtcgaggctgctgcgcgctagcgagcttcgtgtcttccggcgccacctcgaccggcgcgacttgaggccgtcagtgacaggaccgactggcggtttgacgggggctgtcacgcttctcaggctgtccgcagctctccgtccaggatcgcattggtgagtgaatgggtgtagagaaggacgctcgccgcttggcgcgcttcagacctgaagacaaatcgagagccctccctcctctggccggcattgctcagaccgattagtcgcacggcccaaaacgagagaaatccatctatttgctggaggttgagcagcgctcgtcggaggtgacggcagcgttgtctggcggcgttgacggccgtccaggcccgtccatccggagcgcaacgagccgccgggtgaggacattgaagatgctgccgaagaagagggcgagcagggtcgacgtcatgatgatgacgttgtagggcatcgaaaagtcgggcgtcggcaggtcgacgaggacgttggccgtatgaatccgccgaggcagagccggatcgagcggaaagaggacggcggcgcagagctcgaaaccgcgcgaggcgtcaggcgggtgctcgccgtactcgagaaactgcttgaggaagggcgcgacaatgtgcgtcgtactgttggccgggaggacgaggtgcgagaggagcgtcgtcggccgtttgtgcgggatcgacggctcgtaagagatcgcagggacgatgtcgtcttgtgccatcacagacgtcagcccggagatcgacgactcttgaagtcaacagaacgtctgctcacctcgctcgcgcccaatcacagtgacctttcgctcactcagccagcctccgatccaccacggccactcctccatcaggacaacctccgacggcgccagtgcgttgttcgtgatgacgagctcgaaggctccctcggtctggtcggctccgagcacggtccgacgggcgatcaagggtagagggtcgtatgagcgagctgcaacggccagggtccggcaaggtcagtcgaatgatggtcaaacggctatttccgggcaaacgtacggaagacaaaggggctcgagttgccgtacgacagctcgaaatcaaactcggggtctgatcaacgagcgtcttgtgtcagccttgccatacttgctggggtggagcgaccatgactgaccatccttgaggttccaagagacgacatttccctccgtcgcgcgctctgacgaggagcgcaggacccattggccggcagagttatcgctaccgctcggcaaaacgagactgagcgttgacgactgcgcgggagggaagggcctcggcatggccgtcttgaacagtctctcgatggacaggtctgccagggagacacgcgatctagtcagcccggcccaacgcggaaaggtagggacgagcgcgacgcacctcggacgccgcttcccttcctgcggcccaccaggtcccagacgacctcgaacgaaaggttgatgcacacgtcatcccgcccgtcttcggcacgccagaccctgaccttcatcgagctccactggccggcgagcacccgatggctcttgagcaggcccgagagaccagacttgcccttcgacggcagcagcttgaggaaaggggtcaggttctccgtgcagagacccgacggaggcgacgtcgtgtggtagggaagcggctctgagcgcgagagaggtcagggtaacgatcaaaccgacgtccgccagctggacagcagacacgagcagaactgcgcaccggaaggagagatgaggtgagggataaaagggcgcgtcgtgaaggtgttcgtgagggactggccgagagaggcacagaagaggcccgacagcgcgtgcgtcagagcctggtgacgttcgtccgagctaccgtcagggaagttcaatttgatcgtcagcgagtaggcctcgtcgtcgagcccgatgagggatacgcacttcaacgcgtgacccatcgcggcccaaagttcggctcccgagccgcccgtttcactctgcggatagccccagcgagcatgctgccacgtcccagcggtgagagagagctcgaacgagtcggcctgatggctccggaggatcgccaggagcgatgatggcgccaacgtctcatgggctgacaaccgggggtgcgttcacccggatgcgcaggcgacatgagctcctgtcggctgcagcagcaagagggacgctatcgcagtcgagagacgcacaggcaagaccgtccgacgcattgatcgagaacgagaagaaggcgtcgaccttgccgtcggcgagcgggcggatcgccagcgactcagcgaaggtcgagacggcgccggcggcggcgagcgtccctgaggcagagaccgccagtagagcgacgaggccacaaggcagcatgccgggctagagagcggtcgagcagtcgagctcgaggcctgtcctatacgtcgggtcaggctgcagcaagaggggaagaaggagttgccaggcgtcgaagtcggtcgtcgtcaaggggcaaggctggtcgtcctcgctgcttcaccttgtcgtcccggtgcacccgaactacatccctctcatcgtgctcttctcaggtccctcagccactcctcttcgcccggacatcgtccttgacattcctgccagatgctcgctctccctcgtccaaccgcgtcccggttgccgagtctccttcgcgcgagctcgagctcaatcaactcggccggcgcgagcctgtcgtcgaccgagccgaaggccggcagctcgtccttcgctccacgccccccgaggcctcgtcgcccgtccaacgtgccccagatcgaggtcgactactcgcggccacacgtcgacctcgttgccctgtgcgtgcgatgcttagtgcgttgcatgaaggcgcggaacagaaggctgacctgccgcctgacccgctctctctgcgctcgtgcctaccggttcacattcgctgatgctcccaggcctgatccgatctcgaatctacggccgatcctctacaagcagaccgacacgccgcccgcgccgcgcaacccggccttcccgccgcgcaagcagccggttccccggccgtcgcaccactcgccccgatccgaggcgagcctgacgcttgcagcgttccagcatggtccacggctcgcaccggaagatgtcttctaccgcaaggatgagtttccactccagggcgacgagacggagaagaccaaggagtaccgggtcgtgcgcgaggcgctggacgagtacaatcaggcgttttgggtgcgtcgccctgctcggttcagctcccgatcgccctcctcgggcgaacggcccgctgacaatcatctgctgctgctccaggcgtccaacaacacgcggtaccaccttgggctcaacgctgagttggcaaagctgacaccatcggacccgccgacgcacgccgacgacgaggcgcgcatccattgcgtcgacgactggaacgcgcgctggatcgagcaggagcgcgtccgccagcgcaagtggatgaaggagtggtggggcggccaggtcggcgtcctgaaggcgtggtgggccatgaagcgcgaggcgccgaaatgagaatgcctcgcacttgtcgccggcattcgcgggctctagagttgtcgctcgcgcggcccagatagttcgggcaggctcatcaggatcgtcacattgtgggcgtggcattaggggcgggtcgagattgcagagaaggaggagattggagaggctcagagccggacagaatcggtgtcgcgccggtgccgtttgaggagacgcagccgccggtagcaggccggctcgccgagcgtcccctcgacttgctccagcaaagggccctgcatgtcgatgagcgcggcgtcctcgtcgggggtccacacgtggccgtcctcgagcgggagcgaggcaaagaggatacgttcggcggcgccaaacttggggtagaccgcctggaggaagggcgtgcagcgccgccgatcgacctcatacttggtctccatctcgaccgcccaggcgattacctgctctttaggcgagagggtacgcggtgcgagcgtggtcgaggcggcactttcagcgcgaccggctgcacaaaggtcgggtgagggtcagcacgacgtacgggatgaagcgagcgaacgctgtcgagagactgacagagacgtggctttttgtgtgcaggaccgcctaggtcaaagtgcggcacgttgccgatgcccgggaggtcgagcgacttgcgtggtaggggtcgcgagagccggcgcttctcgcggccgagtggcgtaggttgctcggtttggatgggcggcttgtggacgacctcttcggcttgcggctgacccgtcggcactgcttgctctcggttgaccggaggcggcggcggcggcgacgagggactgatcggcgtcgcctcgcgtgatgaccgggcaggagggagaggtgaaggcgaccgagtcttgggacgggcaacgagcgcagccttcgtcggttgcgagacagacgaagctcggccgcgaaggtcctcgtcgtcactggagtcgtccgagttgatgggctcagcggcgtgctccatgagagcctgcatggcgagggtggcgccgccgggaccgtctccagcgtccgtgtcatcgtctgacggctcgacgttggttccatccgacggcgcgaggggcgccgctggaggagtcggtccagccgacgtgtgagcgggcggcttagcggccacaaagtcgtcgtcttccgactcggtgtcgtcggcgtccgccgccagggcgccaccggcgagagcggcaagagtcgtgtgcatgacttgcgttgcctgaccggtgccgtcgctaacgtcgtcgtcgtcgtcgtcattgtcgttcgtgtccgatagtccttcgctggcggccgctctggctgtcgaagacgttgtggcagctgactcgagctgctgcgccgcgccagatgcgacaggaacgatgccgtcggcggccgctccggctgcctcagcaggttgagcaaggctgggcgagggaatcaaggacggtacgctgacctcgcggcccacgtcaaggacgtagtccatctcgcctatgcggatgtcgtcgtcgaggagatcgtcgagaggaatcgtgggcgaccggcgaccagcatcaggcgggagaacgtcggccagatggcgtgcctggtcgtcctcttggacgacgacagtctcagcgcgaggcggcggagggggctgaggcctgaatacgtcatgaagatcagcgtcagacacgacgagacggagatcaagaatgaggactgacagtcgagaggcgccggccggacgggtcggttgtgcttgtgcccgaggagtaccgtcctctgcctcagtctcctcgtcggcgtcctcaatttcctcggactcagggctcggtgcccgctgcggtcgcgacgctgcggccgatttcggctgagccttttcggtgcgcttcgactgaagccgatcgagcattgggcaggcgacgttgccgcgctcgagcttgagcatgcgccgctcgagcgccgcctcgaagccgagcgcgcgcttcttcatgaagcggttccgccaagactgccacgtgtgcgtcaatgtccaaggccgaacctcgggctgcaacaggcagcggacgtcagtgcgtggtcggcgagatcgagcgaatagtcgcgaagactcacctcggcgcacatgtcttggaagatgcggttaccggtcgcgccgatatgctgaccggcgctcggcggcttcgtcttctgatggtagaggacagccgccatgtagcggaccatgttgcggtcgtcattgggcgtgtatctgcgccagatcaggagcctcagcctcggctaccttgctcgactggatgacagtgagcgactcactcgtggacgatgacaccggcaggccggcctggtcgccggcgggaggctgctagagtggagggcgcactcttagcggccggctgcgatgatggcgggctttgttttgacgaggagggcgcggacgctagagggctgggctctgcagcagccaaacggctcggtagctggcaccgttgacgtcccgcgactgactcgtgcacccaggagggcgagccgagccgaggtctggcgatggagctcttgatgcgcttgatgcgggcgagcatggtcgagtcgttcgactcctcgtcgacgacgatgatatctgcacgctcctcgtcgacaagccggccgccgttcgcctgccaggaggatcccaagccgtcagcgctcgctcaagtaagtcaaggccggcacaccacacggaacgcacgacgacgaggttctcgagctcctcccggtcgtcaagctcgtcgacggcacagatccggagctgttcgccgcccgtcttgcgcacaaagatcggcactcggctgtccatcacatcgggcttgagcagcttgccccggacgacgcaggccggaacccagtgccagggccggcagcgccaggagacctcggcatcctcgcgcaggcggatggccttgcccttggtcgaagtcgggtcgacgagccttatgtctgcctcagagacctttgtcgtgagctggccgccgtgcgtctgtaggggcggtgggcgcgtcagtctcgcggctgagcaagggtcaggtcggggcgcgcaccagaatgagtcgctgcaagtcgtccttgacgcccgatgcaagctccggctggagctcaaaaatgaggacgagatcgttcttgtccttgaagagcacgctatccttagccgacccagttgccgacgtcccggccgaggtttcgaccgaaacatcgagggcccggtgctcgtccatcgacttctccatggcgtcgtcactcggctcctcgatggtaggcacgggctcatcagcgtccatggcgtcaccgccgtcgttcggattctccgaggcgggccgcgcattctgctgacgttctggctgggcggcaggttcgtccgaagcagcggctttgctggccttgagctgagctgctcgccgcgccgcctttgacgcgcgtttgagctccgttccaaacagcttgcggaacgcaggcacgctcagtagctcggtgtgcaccagggcgtcgatccgagtctccatcgttgccgacagttcgccgacctcgacgacgaaagtcggcccttcgctcagcttgacaagcgatctgcgagggcaacatcaagtcagcacttgcacgtcgccagccggcataccgcagcacgcaccctcccgcatcccggatgaagtgccggatgtcgtcgagctcggcggccggctccgacttgacaggccgccggccagcgatgaaaaacgtcttgttgcggaagaagtcaaatctcggctgctgcgggttccgaccaggtattgatgcgtcggcgacgagatctgatgaccggcatgaggatgcgacagcgttgactggggcagtcgccgatgcggctcgcgacgtgtcggcaggcgggatgccggcgactgaggcggcagcagcagcagcagcagagtcctcctctctctggtcgagcatggcctcgaccgatggcagggtaaggctcggagacagtggagcggggacggcggcgtcctcgctgttggctaacgggccggtggatggcgagggcgagagtgaagtccggccagtgcgctgtgcgtcaagggtcagggtacatactttagtcgcgtcgacgaggatcgggaccacatctgtagacgcaccttcgccagcttgggaccctgaggcgtcgtctcagccgcggcagcctcgtcctcgagctcgtcgacctcgtcggcgtcgcccgcggtcgcaagctcgtcctcttcgggccggtcgtccgactggagaacgtcaagctggtcgagctcctcctcctcctccatgtcattgccgtccatgacgagcgtctcgttgagcatcggcagggatgcctgcgacggcccttgcgaaggctcgggcgatggtgtcgggctcaggcggcggcttcggccggcgcgtggggtcgcgaccatgctctcccggccggcggtgcgctgcccgcagagaggggtattccgtcagcttcagcatcagacactcgcgctgaagcagagccactgacgacgttaaccatcagaagcaggggaggcagaagggaaagggagagtgcaagatggcgggcgggaggaggcggcgtcgcgtcgtcccgctcaacatgggctcctggcgagcccaacttggccgtttttgggcccggccgcgcgcctgcctttgggcgcccgggctgaggcgcgcgtgctcgttgcgaccagctgtcgctgccgcaacccgcacctcctaccttcgccaagacccatccagcagatccagcgcacgagctgcaaggaaatgcaggccttgccgccttctatcgggcccaagaagggcaggaccggtgcgttcctcagtcggtcgaaggcgggagctcagtcggccgacaggccggcagcgtgtgactgctatcgttcaaccctgcactagcccgccctcccgtccgagcttcatccctcgggctgggtgctggtcgagtcgtacttgcgcgctgacatctggtaactcttctcctgacccttctagagctcgagcgaaccaaggacaagctgctcgggatctcgcagaagcacaacgacgtcgtcattaacaacgtctcgcaccggcagaagatccgtgagctcgaggacgagctcttcaacctccgcgacgagtgccagggcctgcgcgagcgcaacatcgcgcttctcgctcggtgccagcggcagagtcagcagcagcaggttggacgcggcgtcggcagctcaagcccggagaatcaggtgcggcgcgacctcctgccagtctccctctgacgcgcgttgcaggctgctaagcgatgtccattgtctctctgccacacaggttcttctccaactcatcacgaccctacttaacgcaacgcctgctttggcgcagatccgtaccaagctcgagcaggcggcagctacggcgagccctccggaggccagcacctccgcagcagcagcgaaccccgttccattccagcactggacgccaaagctcaatccgcctggaaacatcaaggcgagcgccgagcccgtgggaatcgatggtgtcctggaggaggatgaagaggacgaggaatccgctcaggcaggaccctcagatgctgcgagccggaggtatgttgatccagccgcctcctcaatcgatcccttgctgaccgaggctgtcacccttgtgcgaacgcccagagcaccggtcgcctcgacttcttcaacctcctcgctgtcctctatcgcgtcgtcgtcgtcgtcgcgatcgctcagccatcagctgctcgaagagacggtggttccacgctcgcagtcgcgctcattacgtgcagaccgtcgcacatccggcctcgtcccaccgccaatgcttcctcctctacctatcgcagggcagccgacatcgctcggtctctctcggtctgacacactcgacaacctgccagacatggacgacgagtgggaggaggagccggttcgcgctgagccctcctctggcctctcgacccgctccggagacgaagaggtcgagcagctcatccagcacgtaccaacttgggctatggacactgcgcaggtaacctcgcctccgctttcatcgatggcagacttgtcgtcgactctagcgaggccacttccgcaaccgtcgagcgcaaccgccgggcctacgagctctagtcgtccccctcccaaggcggcggccgccgctttgaaaggcccgtcggccacctcgtccaataggaagcctgccggaccacctacgcctacagtaccccactctgctcctccagcatcgcggaagctagccgtgccggtcaacacgacaacggcctcctcttcctcctctcgcgtttcgaagactgcgccgccgccaccgccacccgctcgctgtgatgctgctgagtcctcgacgatgctcgtcgctactcaatcctccgcctcgcttgattccgctggaccgattgtccaacggcgtccgacagcctcaacatcggcgacagcttcctcatccaaacctcgcccgacagccgggttgagcacgtcctcaggctcgacgaagccccgaccctctgcctcgggctcgtcagcgacctccgcgccactacagaactcgacggcaggcaacatcggctccagcttgcacacgacggtgggctcgctgccgcccaataagggcagccttcccggcgtcaagatgcgcgacgtggcagaggcaatgcgcgccgccgtaaaagcttcgactccgccgccctcctctcattgtgagtctgcttctcatgttgaccgcacgctgcagccggagctgattgtcggtcacgcaccacctatgtcagtgcactccgatccgtcgacgccgatgcggacgctctcgctcgagccgccggcattatcgccctctgcaacctctgcgaccacagtcgacgaggactcgcaggaggtcgaggccggacggcgtctaggccgcgctcgaaagagcgtcaactacaaggaaccaagtctcaacacgtgcgtccccccatttgtgctgagtacaggagcgccaaagtctgatgcgcggttttccttctgcaccacagcaagatgcgcaatcccgtcgcgacactgcccaagaagacgaagcgctcgtctgcggcggccggctcgagggttggcttcctgactggcgacgaggacgagctttcgcactcgctcttgcagactcaggacgcgtccaacccggccctcgtcgtgccgacgagcggcatcgtccggcgcaagtcggtcctgctcaaacggggggccgcgccaccggcatcggacgaagccgccgtcgagtacgagttgacgagcgacgacgatgagtacgacggcgagggagagtctgctttggcctccgagcaggaacatgcgccggtcgacgacgaccagcaggcgacgcctcgggcgatgaagatcgtcacgccggcgccgaggtcgtcggcggcggtcgagcgcaggagagagagcggtgccgcgctggcaggtaatgcgaccgctctgccggcaacggtgtcgtcgagacggacaagccaccggttcagcgtcggcgttggcggttgacggctgggagggctggggttggaagaggaacacgcggtttcatccttgggcattatgtcaacttcttagcacgtcttgttgaggcctggccaagcgaagcgcgtgttcgagagagggatcatgatctagtctccgccaccgctccgcgtcgtcaagggtatcgcctcctcgccggcttgaccctcctcagcggtgacgttgccgctccagtcgcccatgctctctcgcatctcgcgcgagacgcaaagtcgctcggcccagagaacggtgccggccgtcgtcgagccgaggacgagccagaagaagagcgacgtcggaaaggcccgtgagaagtaggtcgtcaggacgatgtggttgaaggcgagcgtcgcgccgtggtcgagaatgtgcgtcggccggcgcacaaactggtagaggaaggcgacgctggtgatgtccttcggccgtcagcaagcagggtcggggagcgctcaagggctgggatctggacgcactctgcgacgacggcgatcccccaagcggcggcgattacccagcctcgccgtcggtcaaccatgccgtcccacgcgtcgacccatcgcatctctgccctgccgacctcctcctcgagctcgagcccgccgttgccggccgcgccagcaccgatcttgctgcccccggaccacgccccgccaaacatgtccatccagccgccctggccgccgggcttggccgttgccggcaggtcaaacgtcggtcgggcggccatctcacgccagtccatgatggtcggcacggtcgacggaccgccctggtggatgaggaacgttggcagcgtcaaggtcgacagcaggaccggtagcaggagggcgagcgtcaggtagtgcagcgcctggagcgagatgatctggcggcggccggttcgggacaagtagaagtcagcccaggccgagcagggggtctgctatcaaagctgcccgtacctggcagacgatccttggggagcatcgagcgtcagtcggtcagagctcgtagggttcagctccgacagcgcaggggacgacgagctcacaggatcggatcccagccttggactctacggctggccatgatgcccgttcaggaagctcgggcccggacgagagatgggagagttcgtgctcgctctgccaaggcgtcggtaggcaagctgtggcgaagtcggacgagctggcggaggatgccgtcaggaggtgatctcgagcaccgttccggctctcggctgcccctccgacgtccaccccgccatctgctctcgtccgccgttcttcttctcctacctacttattgcactctcggcgatggatcaggtgagtgtgctggccactgccagccctgcctaactctgagctgacgcttcggagcagagtacgttccgctccttccttacgaccccccggccgggtgctgcggcggcctcgacgtcagccgcctcatccagctcgagagccagcctcggcggagccgctcccaagcgggcggcaggctacaacccgtatacgactgccaagccgtgagttgacagctcatgtatcgggagggcgtgacgcgagagctgacctgtgagcgatccagggcgacgcgcgagtacaacgccgacgacggcgcgcccaaggccaagaagacgtgggtgagcaagaagagcgacaggtacgtcgaccgggcggccgctcggcggcaagggctcgacaacgagttcaccgaggtcatcgctgtccgggacgagtttgagcgtcggcaggagggcgacgacgcggccgacgtcgaggccaagcgccagctgctcggcggcgacgcggagcactcgatcctcgtcaaaggtcagtcactgtcatctgacccacctgtctgtgacggtcgctgacactgggtttcaaccgcaggcctcgatctggcccttctcgcgcgcaacaaggccgccctcgacgccacgcaggccgagtcggacgacgaagacgacgtgctggaagcggcttacggcgccggggcgtctaccgacctcgtcccggcagtagacgacgagttgtcaaccgggcggaagcgttcgcgtgaggagatcctcgctgccgtgcagagcaagcggcgagcgctcgccggtgggtccggtagtcgagcggccgagccagtcgcttcagacctgaaccggagcaagttcaagccaatcggcttcaaagaggagaagaagtcgaagaagaaggcggtcgtcggaccggacgggcatgtcaagaagctcaagaagaagacaaaggtccgaccggccgaggtcgagccgaccgtgacggccgctgcgccggcaccagcaggtctcgacgccgatcttcctgtcgtgcctgctccagtcgaagggtcaccctccggaccgtcttcacctctagccgcaccagctgccgcttcggccgctcctgctcgcccaacccccgccgagaagcgcttcgcgaagccactcatctcggccgacctgagcgacgacgacatctttggaggcgtcggcgagtacgagggcgacgtgccgtccgactcggacgatgacgagggcgcgccgaaagcttcgacatcgaccgaggccgccggagagatcaaaggggagcagttggaggcgcccgtgccaaaggtcaactggttcaagacaggccggacgccatcgccacctcccgcacccatcggagtgccgtattcgccgaaaggtaaggagcgcgcgaccgacgacggcgacgaagccaacgagggcggctgggcgcggtcgcctttgcctgagccagtgatgcggctcgtcccgctctcggggacgtcggcacgcgacatgctcgcccgggccgaagcggccgagcaggcggccgtccggcggttgaacaaggccaagtggcgccagagccagggtttggccaagcaggctgacggggccgaagacgacgatgaggacgagggcgccggtcagggcggttggagggggaaagagaaggtagagacggttgacaaaaagcgacttaaccacggtgcgttccgtttgcgaagaggcggcggacgacaggtactgaccaccaggtgccaaagacttccagcagtatcagaattacgtcaagaagctcgacaagtagcggacggcggcgactcgacggccttctatcctatgttgtgcgcatcccgatggcctggccgtgactcctgttcgacgaccctaccaaactcagccgtcctcgagaagacccgcatgagaggtgcaaagtcagccgtcttcggggaacgggcctgggcggccgacggggcggccggccgtcgggcagcaagcagcagccgggaaagaggggtccgagcgatgccaggcgcagggctgacgctggcgccagggaaaaatgctgtcgcgcgtgcgtgcgggggcaggctcggcgggcgcgcaggctgccccccgcttggccctgccgcctgtgcagcggaccatctcatcgcaggacgcagcctcaacccctacagctctcgctcccctctcgtcaagcgacatcgcgcgctccagtacatcgtcaccgtctccttccagcaaggtcgctcctgcagcggaagttcgacagagcacctactgccgccgcccaggccgatcgcctcgcctgccgtcgcctctcgcctcggtcgcagcgcctcgcccatcgcccgccctccctggtccaccatctctcctcctacctgcagcaccagcatctggcccgtatccgacccacttctgctcgccctcgtttgcgaccgatcgcagaagcgccgccagtgaccgctctcgacccaaccaccggccgagatctcccgcccgctcgagcgcgaccatctcccccctacctcctccacccggcctcctacccttctggctcaaaatttgagaccgtcatccggctagcccatccagcatcctaaccagatctcttgaacgccagcgatgaagcgcaagctcgctcacggcaactgcggtgcgtacagccgagcgacgggcctgcgcagggaggccgcaggaagctgactttctcgagctctgattcgcgcctacggccccgcttctcccccgcctctcgaacccattcagccaactgcggtgttgacgaggtgcgtcttgcagctcgccaactgctcgttccgatcctctgctgacaatgaatttccggctgagcagaatcacacctcgctgtggcggaccggtctcgacaaggagcggctatggtgcggcttctcccctctcgcgcgcgccgcccctctgtctcggtccgtcgcccctttccttcggagctgacctcctgacctcccttattgtcgcatccctccttgcagcaacgcgtgcgtagcccttcattcgagctgttgctcgagaccgctcgctgacattgccactccatcagttgcggcctatacgttcagacccacggcaaatcgcggccgacctcgcattttggaggtcgtcggccacgcaacaaggataaggagggcggagcggtgagcagtgctctcttcttagtgccgcaatgcctgtctgctgatctctccagccgcgttgtcacagacctcgcgcgactcgacgccggctgggacgccgcgcggcacgccacggcactcgcccgcgcccgagaacacatcatcatcggcctcgaccggctcgtcgtccgacctagagccctcgccgccgcacgtccacgctcaaccccagccgctcggcgaacgtcagtcgcgtgccccgcgccggcctcatcaaggctcgtcttcctcagtcgcccggagcggctcagccggccggcctcgagtcaagcttcctcgcgcgccgccgaggccgcagtcggcgccgccgacaaagcatcgctcgcgctttggctctgccagcggaccggtaggtaacggcgaacaaccgtcgagcccgccaccgtccacgcggacggcgtcaaagtcgggccggaacacgcctgtccagcgcgagcttgcaaccgacgtcctcagccagggccagtggtaccgcgtgccggagaagacgatccggcttgacttttggagtaagattgggctcgacgcgggcgtgcctacgcggccgacgggccacggcgggacctcgatgatgcggaccaactcgatgccggcctacagcccgcgcgaggcacttttgacgccagacggcacccggagctcgttcttctcgccatcgagcgcgaacgaagattcgttctcggccgccgagggcgacttttccgacacggagaatcccaacggcaaacgcgaccgctacgtcggcccgctcttcagccgagccggcagcctcgagccgaacaacgtcagcgccagcagcagcagcgccgacttggccgcgctcgaccggatggggctcatcaacctcgcgagctcgccacacggcacgcccaagcgccggtcgatctcactccgaccgtctgccccgacctcgcccaggcttgggcactcgccgctctcgccggcaacctctcctccggcagctctggtggccgaccctctgacgccgaaactgtcgcccgagcaagcgctcatcgccgacgacgacgcgcatgcagccaagcggatccggtcgacatctcccgcctcgccgccgacctcgccgagcctgacacatgcctcgccggcggcaagtccggtgcccatcggtccgagctcgatttccgggccgtcgtcgccgacagccggcgtccagcatccgtcgccgctcatgcaccacaacattgcggcccagagcatccctcgctcatcctcgcccctgcgcttctcgtcgacggcgatcgacaagctcgcacatgcgccgctgccgaagagcagcctgagctcgcccgcgctcagccacacgctgccgctcacgccgctcgccgatagtgcgatggacgtcgaggagccgacgacgcctgccgacgaggacgccaagccgacgctcccgcctccgagcgagtcgtcggtcgccgcctgatcggtacccctagcccacctctccttccatcggctcttaccgccgcctttaatgccccgctcttaccccgcctacgatcctgctctacgttcccttctcgctatcaccttaaggcacaccgtcagcggccgcttgtcgcacggtgcgacccattcacctttgcctctctctcttgtcacgtccttccacgcctggccttcggccgaccccccttcttctcgactcaacctctgcatctgggcgtccatgcctctcacttctctcccacttctgttgtcctccaccctctcgcacacctccccctccgccggatctgccctcaactagacatacgctcgatttccctacctctcggcctcgtagctgttctctgtctcgcatgcccatcgactccacgctcggtcatgtctacagaaccggcgacagtcgtcactgccacgggggaagtggcgccccttgcccggagcgcgcgccgagccgcatcttatccgacgagtttcgaccggcccttgcaaaagtcctgggtatagacaaagcagtctacagtcgatcgggtgcgcctccgccgtcaaggcaggccgcatcggccgcgaggaaccgccaccagagcgggacgatgaatacggtggcgaggtgccagaagctgtgggcgtcaaacgtccggaggtgcggtggaaagtcaaagagctcgaagcacatagccagcatgaagaggaggccgacgagtgctggaagccgggtgtgcgtctgcgaccgctgctgggcgtgcgacacgtgcgccgagaaggtcgtcggggccaggtagggtgccggcaggagcttggcgacgaagcgcgtcggcttgaccgacgacgtcagcgaccaaagcatccagagaaggttgtgcgtgatgccgatcgtcgcgttgtagaggatgttgtacgcgtctgccggcatcggtacggtcaggcgaggatcttgagcagcagcgagaggtcttgggacgtacaatcaaagcgctcgagcgaggagaggtagaggacgtggcaggtataggccatcgcggccagagctgccagtcgcttgaaggaagcagagtatgctggccttgcagtcgctgggtaaaggtgccagatccggacaatggcgagaaagagagagtaggtgatgccgagagcggccgagaagtagtccatccgttcggtccacggcttgtctgtgagttgcgacggatcggccggtcaacatcgagcttgttctcctcgtgcccgaccgggaagagactgacctcggatgtggaagacggtcgaccagacccaagtgttgacgccggcgacaccccaggcgaggtagagcgtgcggagcgggttgccgtgcgcaatctggcggcggaaggcctggatgccgcgccagtgcatgaggccgttggctatgctgaaggcgacgctcgcgggctcctgcatgccgagcactctggagagggtcgtcgatgagaaggtcagcgatgagttcgtgccaggccgcttctagcgcgcgcgcagcgccggaacgcagagccgcaaaggaggaaggaaggttgagaggaagaggctgcaccttctaaacggccacttgccgtagaactgatgctggagctggccctcggtgagttccgtcatgcagtcgtacttgcactcgtcggagcacgtccagtgcgtgaggacgagcgccgctgacgacgttgtcacgacgtcgggcgagggcgcgcaccggtcgaggcacgctgcgaggcacgctcgaaacggcgggctgttgtcgccatacgatgcgatggccggtccgacgccgaaagcgagtacgcccaggagcagcagcagcggccaaggcaagcccggacgacgcgagcccttggtcatggcgcgcgcgactagagagggagaggaggaccggggttcgaggcggtcgcggggtgggaggggctggagaagcttcgacagttcaggaccgggcaggagctggaacgacagcggctgtctgtctgcgagacgtcctgagttgcacgcgagctgagcttgccggcagtatcaagctttgaccggtgcggtggcggcggatccgagggcgagggcgggagatggtgggcgttccgcaagagagagcttcgtcttgcccccgccaaccacgaccgcaggaagatgtcctccctcctcgcccgcatcaagaaggccctcgagggccagatcgtcagtcaccagttggtatcgtcagagactgaagcttcgctgatattgtccttctgactggccgagcaggactttcagggccagacgacggctgagcgcgccgcccagctcgggctcgtcctctctgcggtaggtcggcccggcatctcgtcgcccaaggactcgaggctgatacagctacctcggtttgcactcccaggtcatcgcctttgttgtcggcgccgtcggccaagacatccgcttctcgctcgtcgtctttgctctcggcacgctcgcgaccttcttcgcgagtcgccgactgtctgccggcgtgtgcggctccgcctcaccgccgaccgagccacccgctgacctggcgctcctgctcttccggctttgcaggcagttgttccaccgtggggataccttaaccggcatcagatcacttggcggtcgaccgctgtccagacgaaaaaggacctttgaagagccgacgccccgaaccgagcccaaggagaaggcgcgcgagagccgcgccgttcacgactgttacgacctgcggatgtccatgtccgtctcacgctcgagctggagggtcgacagagcgcacgacaggcgcaatcgggctggtcgtgcttgctagggggcataaaacacgacgagtggtgagggttgcgagggagcgtgagggtcgcacgagaggcgaaagcagcgtggtccttggggatgggaaggaaaacgagagtacaagcagacgatacgtctcagatgatggaggacatgacgctgactagggcaacggctgcggcgaatgcaggccatgctcgaggctcgaacgaaagaacgccgccagaggtcgcagccaaggcaacgtcagggaccttaaagttgagcgtcagcgaagggagagccgtacgcgtgtaggactcgcagacacgctccatcactgaaagagacgacggcaggggtttgtgtcagcggcgactggtcatctgagagtcaatagagtgaggacgcacggctcagggtcttggccagttcagtgtgagtgaccgtcgcgttggggctggaggcgaggcagtttgagcactcaacgtaggcgttgagtccctgagttgagcacatgttgcaggctggctcgtaaagggcgccatcgcaggtcgattcatagacggcaaagacggcgcaggccgacgtgcaaccggccgaggctgccgacagcggcgttaaggccggcttgattgaggcgtccatcgtcgaccgccgggagtgacaggaccagccggaggaaaggtgcatcgtcggtgctgtgggggctgtgagcgcaaagtcagttcggacgaaccggcactataggcacaagggggagcaacgcaccagcagaggcgagctggaggaggaggaagaaggcgagcgtgacgacacccttgacagcgaggaaggaaaccatgtcgggaaaggaagaggtgattaggacggagaagaggtcgaccagcgacgtggaaggtgcggcaagagggggaaaaagaggacggaagaaggtggttggggaagagagccgcaagcgaccggcctagccctgcctttaaagtgctcaggcgaggtaaacgcggctatgaaggggaaatgccttcccttgatggccctttgtccgccgctcccggccaggccggtccacgcaagacgccacgaggcaggcggtcgacggccggtcaaagggggctttcggaaaaaaggggcggcaacctcagtcgcacttgcagtttgcaagagatctgaaacgcttacataacgagtctcgcgctgcaggtcgacaagccgccgccgccgacgacttgtagtcgaccaaccgacaccgcggacgatctcgcctaccgctcctctgcccacgctccacgaacgatgctagctcgaccatcggatggtcagctcgcccaccgccagccgttcacatcggccgccggctcggcggtctcgacaggcgggtccttgtcgcgctcgcagcctgcgccaggtggcggcgccagctccgcgccctccctcaacatgcggccggctcgtctcgtcggctcggaaggcatcgcctacgaggccatgtgcaaggtaagcaaacacgcctgccactccccttgttccgctcccgctgactcttctgtcgctctttgtccaacagcgtgtcctcggccgtcgcctggtcagggcgttcagcctggcctttttcacgacgctagccatctggagcttctcgctctcgcttaccggtgcgtcaggtcgtctttctggacgcctttggtcctgctcccatcgctgacagcttgtcaatgctgcccgccgttgtacaggtggccttggcctgacgccttccgtctcaaacgtcctgcgcaacacggcgagctccgccgtcgtcttcgtcacctgcattctgccgacgcttgtcctgcgcaagctcctgatcattcgtgagcaagcatcgtcgaaaagccaattgcctgcgctcttctctcgtgcagctgctgactaggcgctcatcccgactgccgccatcagagcccgagctcgcaacctcatcggcgaccgctcggctccgcaggctcgcgagcgcgggttcgtctcgcaccgctgcgattgtctttgctgcctgcggcggcttggtcgctttcctttgggcgctggtcatgcagctcgcggtcccgaccgtcaagcttggtctgcttgctagcacgaggttcgtccgagagtgaccagcgcttgccgcattggatcgtgggcgccagaaggctgactcctagtcactctaccgaccggccaacagcaagcaccctttgctgctcaacgaacgctacatcatcgtcatcctctcgaacgcttcgctcggcctggtttacgccgctcgcgagctttggacggacgccttcctgcccagatggcctcgggacatcttgcccctccaagggctgatcataggccggctcgccagcagactcccggctgccttgagccttcctgtgattcactccatcggcttctccgccgcgtacctcgcgattcgcaaaccgttcctgcgctttctgctctcgtggttcggcgtgcttattcggtgcgtcgctcgaaccgaagccttgcctcttagcgttctctgacagatgagattccctgcaggccgtacgtcgcaaccttccttcggccaacgcacaaatcgctcgatctcggcctcctcggccggctcgtcgtcctcgagctcatgactgttgcgctctgggaggcggccaaggcgcttctcgccgtctacatggtgcagccgatggtcatctcgcaccactcgactcatccgaacaagtgcctgctcgctggcctcggcgcatcctcggcctacatccggcatttcgcccagtttgagctcgcccacctggcggtgacggcgccggaccgccggcgcgagatctttgccgacatgtcgacgccaaacactgcttgggccgagctctggaggactgagatggtcattctcgggaagagctaccagacgctgcggactggtggtgcgccctccgctccggcggcgacctcttcgccctctgcgcccgtgagctcctctagcgaggcctctgatggccatccgcagcagcgcatcgttcccaagtcggacccgaccatcttcaagcacgcgccgaaggctatgtacgactcgctctcgtccggaccgactcaaagcccgctgccgactccgcctccggcgccggcaccgcaacgccaggtcccgtctgccccgtcgacagtgccggcgatctttacgcagaagtctcgggcagctcaagcgccggcccaggcctcagtcccgcggcatgtgccgtcaaccgccgctccttcaatcgttgcgacagttcgcaggtacgccctgaaggtctggtgggccgtctatggccgcgtgccgggcaagacgcgggcggctcttgagagcaatctcgctccgatccggcaggctctgatgtgcgagacggtcaagggccagacgagagcgtcgctgcccaaccgggatgtcgacatactcacaattaagagtgcgttccttcccggaccgctctccctgctcggcgagccctttactaactcttggacgtttgaccttggaacctcgcttcgatcagccctctcggctctcatttcggcctcgctcgctgaggacccttacggtcaggtgcagggcgacattcctcggacgctcgaggcgctgtcgtcatacctggtcgttctcgagtcgctttatgcccgcgtccaggccagcgccggggtcgagggcgcctggccggaacagcaggtggcgacgatgggcgtcctcagtacggacgtcgagcctctgcttgatggtccgtccctctcgctcttgagttgactttaagcataactgacaggctctctgccctcttgccgtctcgaagccacccgcgagggcatccgccagatcgtccagatcttccgcgagcatctcgcgtcagccttccggttcccgcccgacgtcgtcaagacgctcgagcagttcctcgactaagcacgtgtgtcgcatggccgaacatcgcattccgtcgccgtccaaaagcaatcgtcatgagcagaagcgtggggcaggaggtgcacggccaaaggggtgacggggggcgtgaaagggagtgaggtacaacagggtcgccagcactagtgcgctaagcaccggccgacgcaggggaagggcagaagagggccgtctggcggcgcctactggccaccacggagccggaggacgaggtgcagcgtgctctccttctggatgttgtagtcggaaagcgtgcgcccgtcctcgagctgcttgcccgcaaagatgagccgctgctggtcgggcgggatgccctccttgtcctggatcttagccttgacgttgtcgatcgtgtcggacgactcaacctcgagcgtgatcgtcttgccggtcaggctgcagagcaggtgagacagcgtggggagcatcagcaaacggaaagcgacgactaatacggcgcgagcagcagcaagcagcagggacgcacgtcttaacaaagatctgcatgcctccccgcaggcgcaggacgaggtgcagagtcgactccttttgaatgttatagtctgacagggtccggccgtcctcgagctgcttgccggcgaagatcaggcgctgctggtccgggggaataccctccttgtcctgaatctacagagagcgaccgcaacgaagagaaaggcgggtcagctgccgcaagacgctaagggaccagacggaccaggggagttggcgtaccttagccttgacattgtcgatcgtgtccgagctctcgacctcgagcgtgatcgtcttgccggtgagcgtcttgacgaagatttgcataccaccgcgcaggcggaggacaaggtggagggtgctctctttctgaatgttgtagtcggaaagcgtacggccgtcctcgagcctgagaaagagcagcagcggagggaaggaagtggaaacggtcagccgacggccgacgaaccaagcaagaagcgagcgcgagacgcggagacgtactgcttgcccgcgaaaatcaggcgctgctggtcaggcggaatgccttccttgtcttggatctgagagtcaagagggagcaagtcagccgctgcaaaggggcgaagaatggagagacggttcgcaccttggccttaacgttgtcaatggtgtccgacgactcgacctcgagagtgatggtcttgccggtgaggctgtacgcgggcggagcagagggaaaaggggcgagcaagcgagcgcgagcgtcagcctcaagcttgcaggcaggcgccgagcccaaacagcgagaaggccgactcacgtcttgacaaaaatctgcataccgccccggagccggaggacgaggtggagcgtcgactccttctggatgttgtagtcggagagggtccggccgtcctcgagtctgacgagcaacgtttcagacgaggcgagacgcgcgcgcgcgcagaggtgacgagcgagcggagagcgcagcagcacggcgcgcgcgaggcagacaaaggggaggaggaggcaagagggcaagcttggtcagcgcgcgctcatcaagtgaaacggacgaggctcaaccgagcagcaaagcagaaggggagacgcactgcttgccggcgaaaatgaggcgctgctggtcgggcgggatgccctccttgtcctggatcttagccttgacgttgtcgatcgtgtcggacgactcaacctcgagcgtgatcgtcttaccagtcaaggtcttgacgaagatctgcatgttggctggctgagcagtgagtgcagacaatggcgtcagcgagggcgtacgagagaaagaggaaggcaggcgaggcagggagggaggaaaggaaggaggaggcgagcacagtccccatctcgccgagccgacgccaccaccgcaggccagtctcagcgccggtcggccgacccaccaagctcatccagcctccacgccaggccagctgttggtattaggcccgagcggaggccatccactcgcgagcgagtagggaaggcgcaggagggccggtggaaggcttatcaatcctggtgggagggtcgacctggtggcgaactgcgctcggaccctcactccttcctgacttcccgctcgctcgcctcgaagccatccaggcgtgcgcgtgctagtaagggaggaggacaggcgaggagagactcactgggtgttgtttggatggtgggtagtgtggtttgagggctgaggagcgagggtgggtgttggtggacccgatgcggccgtcccggcgcgggctcaagtacgcgggggcgcggcgcgatgccggcgaggaaacggctgatgcaagttgggcccgttgctgacgcgggcggccgacgggaagcctcgacctgactctcgcctcgcctcgcctcctcacacccatctacactcctcctccagcaacgccatgaaggtcccatccctcgccatcgccgctctcgctaccgcctcgctcgcgagccctgcactcgctcttggtgacgccctcgtcgacctcgccctctggggcgccggcgccctctcgtcgacgcccaagacgggtcggctgcccggcggtccgcctgagggcggctggagctggaccaactgcggtcagtcgcttgctctccatcttgctaagaccgtagctggtcccagtatccggtcgtccgattcgctgccgaagcgagccgtaggagtggttggatcgcctcggcacgcagcgacgggcctatcgcgaggtccaccaccgttcgatcgtccgctgaccctctcttatatacgcacgcaggcctcccgactgacgccgtccaagtcgaatcaattagcgtctcgcccgacccgcccgtgccgggcaagaacttgacggtgacggcgaccggcctcgtcctttcgaccgtctcggtgcgtccccccggctggtgggaagcgcgatgggcgactgcgggctgtgctgctggtctcctgctcgaggctcgactgacccgttctctcaactttgctctcactcgtgcaggagggcagctacgccgatgttctcgtcaagcttggcctcatcaagctccttcagcgccgctttgacatctgcgaggaggcgtgcgtctctgccctctccctctcctgcccgaccgacgctgacctcggcctccttggcttacgtcccttcttcagcgacaacgccaacgcctcgctgacgtgccccgtcaagcccggccagtacacgctcacccagacggtcgagctcccaaaggagatcccgcgcgcgaagttcgcgatcgatgtactgggtgtgacggccgaggacgaggacatgctctgcctcaagctgtacatcggtgcgttagcggctgccggctgagactcatttctgagcatacgactgacgagacctaatgtgctcctttgccaaccagacttcctccaccgcaggcctgctggcgacgccaagtagagcgcgcgatcgtcaccagctcgccgtccatgccttcgtctccgcccgccagcaagcgacggcagtcatctcgcaccttgctagccacttgagcctgctgatgctcgctcgttgccgctcgcacggccgcctcgagcgagcgatcgtgctctcttcgaccggcggctgcggatcacccttcgcccacctccctccatctcgcccctccccggcttgatctctacctctaacaccctgtcctttgcctgccctcttcgccttgcctgccgaaaacttgtaccttgcgcttctcttctcgctcgactgactgctttctcacgccccttgaacacatgaagttttgacaaacgagggccggacaatgcatctgcttgacaaacgtgtacgccccccgatggactgtgtttgagagacctgtccagcttgccgctctcgagcaaccctgcggcgaggaaaggacgcgtgcagcagctggctcaagtggccgactccctttcatcttcgtcgagcagttgcgaccacgaccgcctctgaccttacttccatctgctttcaccccatcagctcatactcctggtgagtagttgttgtgaacttgcttgtcagctgcggcctgacgatttaccgggcttcttcctctatgggctgggagagcaaccggtgctcgctcgcggccgactcgacgaacaacgccttgctcagctcccaacagcgcgacacgccttctcttctcggtggatataacacactgtcagtcgccgagctcaaggctacctttggcgttttgccgtgagctgacgagacttgtccgtccgcgctttgagcagttggcgaggcgaacatccgagctcaaaccaacccctgtcggtcatccagccagccttcaacatctcgctccgacacctcaagcctccaggcactctgatgcgcatcgccgtcaaggagtgcgtccctcctgtcccggctcgtcctcgtcaagttggctcgctgacccgcggaggccgacggccgcacttctcctcggccgcaggctcccgccccgcccagccgtgaccatcaccgttggcctcgaggcgcccgcctcgctcgcagacatccggaatgaggacgagcgccagactcgcatttgtgctaaagagctcaagctgctcgggacggtcgcgaaggcgaggcggtcggctgggatgggctgctgcttgcggaaggctcaaccgtctggctgactgcgccgctggcgccggccgaacgacgccagttgcccgactttcgggtaggccacgaggagttcttccagctccaactcgagacatgagacgtgcgttaactcgtataccgagcaaaagcaggcgcccaggcagctgacttccctttccctttcaaacgcgggtgacagctactttgggcaatgcggctccgttcgcgtccttccgcgcaacatcatcgaagctgtcgagagggcaaccgatgcagggtcgcctggttgtttcgatggtgacagtctgtccccaaacggcaaaaggtcagtctggtccattcgtctgttccaggcgggtagcaggcaagctgactcaatcgtgctcgcagactcagcaagagcaggacgctgacggactacagtatcaaccagaacacggcgacacgcgatatcacacttgcccttgcaatcgacggatgcgacggatcgttgagaccgagaggtgaccgaggccagacccgacggccgagtgggcgaccgccaaggccttcgcatggccgttgccgtcctcgataagcgctgccgttcgagccgggcagaggtcggtgtgacggtcaagcagctgacttgtccatatgtctctgacactcgatcctgaccgggcgcctgtgcgacaggcgtctcgtcgagcgagcctgatggcgcgcgcgtaggcttcacccaggggctggccgccgaagaacgagaggttgaatcatcaagtgcacatcttgtcctgtaagtatgctctgtccaactgtgttagtcgcccagattgtattgattgagcttgagccgtttgcgctgaaataggtggggtcagcgacgacgcatgggccgccatagtacgcgccgcgcgcgcgagaggccgtcgaagcaatggccgcctgccgttcctgagctccttctcctcctgaccaccacctcgcccttcctgctcgaccaactcggccctcagaaaccctgttgaccgtatcgtgagtctctcgttcgagatccacacccggggacacccgcgagctggctgctgaagtgcgcgaagctccctttcatcgcctctctcgctgacggcctcttgtcgcctaccttccctcttgccttccctttgacaggtcaacccagccttccaaaggtccgtcatcgcccgacatcgacccgagccctcgcgctccgctgtagctcggcagctgacctacccctcgtcgccgacctgcccgttccaggcccgccgcgcagcaagcacgaactagcttgctcaagcactccacgactctcgccatgcgcgtcaccatcaacgcgtccgtcttagcccatcgcagctcctctagcggaggcgctgctgattttgtcgacccatcagacttgccggctcgcggtcgctaacgagcgacgacatcgcttccggcgcagttctcgacctcaagctctcgcccaacgctaagctctcgatcacgatcctcaggttcgtcttctagctaaagcgttcgtcgcatgagcggcagattgacggcttggccatttgcctgcgcagctctgatggcgaggggaccaatgtggtcctcaagtcaaaggtcaaaagccttcagcagctgcgggccgacctccagagcaagtttggcaatccgcttgacagctagcatctttttgctccaggccgtacggaccggcagcaacatctaggacgactgcgtcaaggttggctcgactctttggctcgttgactttacgcgcggcgacgacatctaggagcagtactaccgcaggctattcaggactggcgctgcttcgtcaagacgtgcgcttgagctcttactgcccaactcagcacacaaaccactgctgatgatgctgcctctgcctcctcagcccgacgggccgcctcgtgacgatcggctttccacagcaggcgagcaagtgcagcgacatcgaatcccttgtttggtccgaggactgtgagcccgtcgaagacatggtcctcgcactcgacggcaagatgtgcgtccaagctttcggatgaaccctctcacccagtcacgccctgacgctggcgtcgctatcatgctgcagactcgacaacagcgtcgacgttcggcactacggcgtgcgcggcgtgtcctcgcttgtcatcatccgccggccgaccggctccttcaacgtcttctaccgcctgtgagtggatgtgagccgccgacgacgactgatcgccgacggctgacgttgggcgcgggctggcagcatgtcgcacccgtgcatggtgcttgtccttcaacgtctagaagccgcggcaaacacctgactgccgtatcaatgacgccgtccgacacgctcccgaccctcatggctaagattggaacagcagagcggcggagtctcaggccagccggcaggcgctctttggccaggacagtctcacgccagagcggaagttcaatcacctcgaccgctttgccatccagctcgaggacgttggcctcactatcgcggactatggccttcaggtcggctctgtcctcgagcgcatgctcctcaagccgaccgacggcatgctcgtctttgtccagatgccggtcggcggctctatccctcgcacgcgcctcctcgcctttgacttcgcaccgagcgacagaattgcgaaggtcaagttgaccattcagcgccggacgggtaagcactttggtcggcagcggctcatcatcttccgcgacgatctcgccgagaacgaccggtcgctcaacgcgctcggcgtgcgcaagggatcgacgctgtggctcgaggctggctcttcgccaacggtcgagacgctctctgccggagagtatcagattcacgtccagacgtacgtctcaatcccccgatctttcctccatggctgtcaacagacatgacgtgcgactcgtcggctcccgtcagcctgaccggcaagacggtcgcgctcgaggtcaagtgttctgacacgatcgacaatgtcaagctcaagaaccaggacaaggagggcatcccgctcgaccagcagcggctcatcttcgaaggccaccagctcgaagacggcttcatgctcgcggactacggcatcgggaaggagtcgctcgtccaccgcctccgagctagctgatcattgtcccttcggggcgctccgccctgtctccgaaccctcgcttcggatcgacgcgcctgctttcccgtcacgacctgctcgaagccaaccttcctcttctcatgcatgacctctcttcgccctcgctgcgccggtcgcggtaagaaaaagcgcagcatgtctagcccgcgcactccagtcggcgcgtctactgctgctcccactcctcagcctgcgcaaagtactcgcgcgcgatccgcttctggccctcgagaccattcggcaggccgcgcatgacgaggtacttgcggccggtgatgagttcggcatcgagcggcctatcgaggtcgcgcgtcttgccgccaaagaggatgccgccagcttcggtcgcaataacagtgccggcgcagacgtcccattcccagcagccaatttcggagtagaggtcgagctggccggcagcgacggcgcagaagttcttcggaagggggacgaaacgttaacacgtttgttgaggaaagcagtgcaacttgctcggagtacgtacgagcgctgccgagcccatcgaacgcatgccgcggaccatcgagttgccctcgccctggccgacgagccgaccgaacgtccggagcttcttctgaacgacgtcgggcgagcgatcgcttccccctgtgaagcaaaggcaaaggcggtcgcggccggaagtcagacaggcaagcgcaagtcacggcagagccttgagactgacactcgacgccgatcagcgcctgcgaaagcgacggcaagctcggcggcgggctgacgagcggcaagcgggccgactcgttcaggaaggcgccgtggccctttgcggctgagaagagctggtcgaggaacgggttgtagacgacaccgacgacgggaacgccgccgacggtgaagccgatcgagatgcagcacatcgggaagcctgatgagagcaaggtatgatcagccgagcgttcatctgctgcgcagtctgggcgcgatcaggcgtaccgtggacgaagttggtcgtgccctgtaggtcgaggtgcaggtagtcggttgaggtacagatagtcagcctttgaacgcagcgattgacacttggctctgtcggacgcacatcgaccgggtcgacgatccacgtcggcgcgtcgccgagcgcgtgcttctcgccggccgcgtacgactcctcgccgatgaactcgtgcgtcgggtacgccaagcggatcttctgggcgacatacttctcgacgccctggtccgtctcggtcacgagctgcgggatggtcgcagtggcaatagtgaatcgagcgacatcatccgtgagcagaagaacgtgcggcgagcaggcacgggcagcgagacagggcgtcagtcgggtaggtcgcagtgccgcagctcaagcatagacgaacgtcgaccgagttcttcttctcatcgacgcccgtctggttcgcgaaccgattggccgagccgtccttgatgagcttgccggcctggataagcgcagcatcggacgagagcgaggccgtcgcacgagatggtcagccccggtgcgtcgggcgcgcgcgcccctgaagactaaggggcttacggcacgggcaaggtcgatcgtgaaggcaaggatggccggaaggtcgaggtcggcgacagtcgtcatcttcagggcagaaaaaaggaggaaggggttggggtcggagggagggggggatcatcgctgtcggtcggcggaggcagcggcggcggacagtgcatctgctgttcgaggcgcgacctcaggcacggacggctaaaatcccggctgaccaaccccaccggtggaccttgtcgcgtccaggaacagccagcgaaggagcgagtcacctttaggtaaattcagctgggttgttctcgttaaaggacgaggcagagggcgaggcagaggaaaagagagtctgacgacgcgactgactttggcgcggaggcccgcgactcagctgcgcgcgcgttcggaagggctcgatgcttcaacagcggccttgtctttgctgctaacggccatccactctcttttaccctcaagcatccttcctctttcctctctccaggctggttcctgtctctcctagcgaaacccccactctctccccctctccttcagaagcgccggtcgctcctccccttcgacttcggccggaaatcccttcgttcgcccagccaacccgccacccgccacccctggaacctcgacggttccaaccttgacctactccgttgctgccggtcagcatcctactcccctaacaatccatctacggccagcaaaccctccgtcatgcgtctctcccttctcccgaacctcgtcggagcctttctcctcgcttcggccgcctccgccgcctcgctcgaccgccgggccgtcatcactgcaacgacaacgcggacagtcatcgcctacgtgaccgagaccgtctacgcctacgccaacaaccagggccagcaagtcttgacgacggtcccttacatgcccaagccgacggcgacggcgccgacctcgctcgtcctcatcgtccagccgacgacgtcgtcgtcgtcgtcatcggccgtccgagcttcgccaacgacctcgtccgctcctgcccccacgccgaccaagtctgcctccggcaccgattcgaaccggccgctcgtcgccgcctactacccagactgggtcgagtcgaagctctcgcccgagcagatcgactggtccaaggtcgactggatcgactttggtgcgtgctctcaggcgcaactcgctgtgtcgtgccttgtgctaaagcgctctcgattcccgtttgccagccttcgccatcctcgactcgaacctcaacctcgtcttcaccggctggaactcggatgacctcctccgccggaccgtccggcttggccatgccgccggcaagaagatcaaactttccatcggcggctggaccggctcggcgtgcgtccctttcggttttggctcctcctctcgtccgctgctgactgcccttgacccgcttgcagctacttctcgaccgccgtctcgaccgactggaaccggcgggatctcgccaacaagatgctcgccatctataacaagtacagcctcgatggaatcgacatcgactgggagtacccggccaagggcggcatcgagagcaaccgtcggtcgcctcaagactcggccaactacctcatcttcctcaagctcctccgccaggtcctcccggccggcgcgaagatcacggccgcgacccaggtctggcccttcgggggcgacgataaggacgcttcgcccctcaccaatgtcgtcggctttgcagaggtctttgactggatcaccatcatgaattacgacgtctggggcagtgcgttccatattatctccacggactgtttctcagagactcacattcgctcgcttccatacgtctcgctccctcagcctccgtcaccaaccgacccggtccgaatgctccgctttcaaacggctgtggcaactcgctccagccgcttgccaacgccgtcgactcggtcgagtcgtggcacaaggctggtttcccttacaacaagatttggctcggcaccgccttctacggttacatctcgccctcggactcgacaaagctttacacgaagcggagcgactcctcgagtgagctcgagccttcgcctaagcgctcctggggctcgcggcacggtaacgaggccagcgtcacgttgaagccctcaaccagcacgcacggcgagctcgccagacgggccgtcactgtcaagaacgagggcggcgggtcgagcgacggccaggtcatgtttgtcgacctcatccgccagggcgccctcaaatgggacaatccgtcgcgcaaatgggttggcgccaacggcttcactcggatgtgggacagctgctcgtcgacggtcagtggacaccgcccttgcgagagacaacgtgctctggttgctgacagctcgctcgcccgctcgcaacagcctttcctgcgctcgacagacacctaccaggtcgtcacgtacgacgacccggactcgctctcccttaaggctcaatttgcgcgccagaagggcctcggcggtgtcggctcgtgggacctccacggtgacaaccaggcctgggacctcctcaccgccctccggaacggcctcggcatctgagcccttctctctcttctcatctgtcgttccttcatttcggaaccccctctctccctctgctttctgcctcttgtcttgtttgtccgcatctcctgcaacccacgcccgataaacctatcgatgacactccctatgatcctccctatgatcctcccgacgaccctggaaggcaacgtttgttgcgctcaactaggtgcgcccgcctgttgcactcaacctctcggatcttcaaggtgtgcgaagcgcatcgatacagttctatccgtgatgagagtctagctgcggcaagaggcggtcctaaggcgacagccggtcgatcttccactttttgccctcggccgtcggctcgtcgagccggaggtagcgcgcccggtcgtgcaagcgcgagggctggccagaccaaaactcgacctcgctgagggcgcagaatgttgcaaggaggtgtcagtcaagctgacgttgatctcagtctaggctcgccaggccactcactcgggtacgacacgccagccgccccagaactctgggcactcaacgtcgccctcgtccttgccgaagcgctgctcgaccttcttgacacgctcctcgagcgtcgtttcgccgatgacgctcgactgcttgctcgcccaggcgcccatccggctcccgcgcggacggctctggaagtaggcgtccgactcggcccgcgggagcttctcgacccggcccgagacgcgcacctggcgcgacgtctcgtgccagtagaacgtcagggacgcaaacgggttctcggcgagctcgtgcgacttgcgcgacgaatagttggtgaagaagacgaagccggtcgggtcgacctctgctccagccgacgccgtcatcgagatcggagggacggagagagatcgattcagccaaacgatcgctgcagcctcaaggtttctttaaagtggcatggccagcagaggccgagtataggacgcacccttgagcaggacgacacgcgcgctgggctggccctccttggtggccgtgccgaggaccatagcttccggctcatgcacggcaggcgtgccctcgggctcgccggccgcgaccgggtcgagcgcgccggcgagccaacgctcaaactgggcgagcgggtccggattgagctccgaggggatcagacgcggcgtcttgtactggttgtgcgaggtgatcttgagtgtcgatgctgacgcctgggcgccggtgatggaggacgacattggacggcgggtgagggctgagctggcggcggcggtggatgtcgcgaggcgggtcggataaacgaccgaaatgcgagaaaaagcagacacaagagccaaagatctggatgtcgagagagctgtgcggatcatgcactgaatgacggcgatctggcaggtgagaaggagagctggacggccagcagatgggaaagggggtggaggtcagggggtttggagggacgccggctcgtcctgccgttgacgtcgaccttcgctcgctcggtactcttgtcggtacctctacagctcccatccaggtcgatcggacacgcacgagcaccagctgccacagtgcagcttcatatcgggcccatctatgccgtcgaatcccgtcgaggcggttgacaaggcgtcgtcgatcctccttctcagcccatcgctcgcactcgcacgcgccttcctttccggtgcgtcgtcctctcggcgactcttccgagtcgcatccctgtcaaaaggctcaagccttgcgaaatcgagtgctgaccatccctgcccttcgcaggcttcttcgtccactgcggcctgcctctgccggacgacgtgccttccttcggctgggccggccgtgcgcgctgggcgatcagcaacaagtactacgaggccgaggtctcctttgtcctgcgccaggtctccgacgagcatgatactgttggcgcgacggtcgaggacgacgtcgacgatgagggggagcttgagggggcagcgttgggttaccctgccgtcctgcacctcgtatcggctgcgcagctgcgggtgcgccgacgccgctgccgcaccagagcgggccctaactgacctcttctgcttgttggcagtctactgagccgttccgagtgccccgggaggtcagggcggcgtttgccgaagaacgaccggacgtctcgctcgcgtttgcgcttgtggagagcgacggcgacccggtcgtatccgagggccgcgaggaggctgtactagaatcgttccttgacctcggcatcgagttcatctcgtcgacgtcatcgcaaaacattgaagcagatgaagctcacagtacgtgacatctgcgcgcccggtgacggccggctgcagctgaagccccccgtcgcgcagccccgcctccgtttgagcaggtcgtccagagcctgagctcgcacatgtggccgtctcttacactcaagttgtcgacaaatggcaatagcgttgacccggctccgcaagcgcacgtcacgatctcggccttggccggcctgcttggcgggatgggcggcttcggcctgccaccgggcgtcgacgacggcgatggtactgacggcgcgaacgacgccgactcggacttctcggacgacgacggccaaccctttgatgccggatacgctacgctagacggctcgaacgacgacgatgcggccgacttcggcgattttgagacggcgccgtcgctcgacagcgagcatcggctagctggactcgagatccgctctgccctcgccttttcgtctgccgaagtcgagactgtcgacggctcatcagaaccgaagcatgtcagatgggagacgttcgacgcgctatctagtttaacgcaccctacgattgctcagccgactcaatcggatacgctgctggactcgttcgacccatcggtcggctccacgctgtcgccatgggatcctcatccgcccgagcgcaagttctcgtcctctttcgtcccttcgcccacgtcgcctgcaggcccgacagcaacagcagagaccgaggattcgacggccgatctcggcgccatgctgagccatttaagtagcctgcgcacagagctgggaggcgtcgaagacgatgacgagcgtcggcgacgggcggcggccgccgtgatggccctctttggcgacgactttgacggcgaggatgagccatgacacagtcgcttaggacgtcgataacttgagacgtcaggatgcagtcgcgcaagggaggaggaaggtcgtctcatgcagaggcgtctgccgatgattgtggagcgacagaggtctctgagccggcactggttgacttagtcgggatgtctttgcaggccaaggattggaggagtcagccttgcagccctccttgcggcttggctcatctgacggaccttggccggtcgacttgctgcggagctgctccagcgtctcggctggcaacaggtgctgcactttgtcgaggtggtgaagtgtccgaatccgaaccttgggaccgattgtaaacgacctctcggctgcaccggcaatgattcgatagacaagcatcttctgctgtgccgttgccgtcgagtcggcgaggttcagctgcaggagcaagatatggctccgaaccgaccgaggagcgtgcgagacaacgagatcctcgagcatcgggaggagcgcctgtaggcaggcaaacgaccgtaggtatcgtgctggaccctcgtcgcctgtgagcaggccggacttgctcgccgtggagagaacgacggtaaggagacggtcgacgtcgtgcgagacggcgcccgggtcgcgaggctcttcctcgagggcttcctcaaagccgtcgaccttctctactcgggaggaaagccgaggtcagcacctgctttgcaagcttcaaaaggacaccgactcacgccaaagatctgcccagaacgcgagctcttgccgcacgtcgttgcgcgcctcgtcccgctcgattgccgagatggcttcgtcgtcgaacagtgccgagatggaggttcggagcaggttgcggagcgtcgattggccttcacgatctctgccctgccctccttgatcagagggagcgtcggctttccttgccaagaccttctggaaggcgtccgacaggccttgcgtggcgaggggcaggcttatctgcagattcgggaggaaagccttcgcctgcaacactcccagaggaaagacgatcctggagagctccgtaaggctcgaatcgtatcggcgtacgagttgcagcaagggctcgttgcagagggcgagcgcagcagcagcccgacctaccgcccctggagacgaagcgtcttctgacgacatcaggtgtcggagccctttcgagacgatgctacattgcgccactcccctctcgagagtcagcaccgattgcagccagcccgctgacagagtttcagccaggaggctgtcagcggtgcggccggttgttcgtgaagagcacggataactcacgaagcgcctcctacaactgcggcatctcgagggtaggagtagttgccttaaaccattggactagatgaattgcgctgcaggttcagatccaggcgaaaagatagtgcagagggcgacgggctgacgagtcgttgccttcacacccttgggggcgcgaccgcctttttgcgcgcggtcaaaggcctccatgttgcgccaaccgcagatgaggactgtcaaagagatgatctgatcagttcagactcgtcgatgactcctgcaaggtgacgagcgagatatgcgcacgctggaggccgagattgactaggcggccttcggctgctgctgctgcgccgaccccgagagagtccgaggcgcgagccgatcctcgccagccacaggagagggaggcggagtgccagtcgacgatgcgaaactcctgatgagagcgtggcctctcgagaggcgcgagcgggcgagacgagcggcgatgaacattcggcgaagcagcgaggtcaactgggcggagcgcagagcagcgaagggcgaaggtgggtggtcgtctaagagcagatcgtggcccagctggcgggttcactcagtgacagggcttcgaagaaagcccaaaagtatctccctcacatgggggccaagaaggagtcgaggtcgaaggacgatggcggtcgagcacgaagctgcgagtacaagggacgagggacaaggtagggagctggcgcgagggagggagctggcgcagaaagccgacgcgtcagcacgatgcctggtcgatgtccagcgacatacaaaagcagcaggcagaatgcttgctgcgcgaaaggtaccttttgctagctcttgacaaggatcctgagcgctttgacagggagagcggcgagcgtgatggtcgatgggacgaacgcaacctcttcgtatcgccggagcttccgccgagtgcgactcgcctcgaaccagcacctcgcgaggccgaccgacttcttcgactggaccacttgcactctactggaagccagttcgcgagtcccaccatctcctccaccgtcataccatgtccaggtaacctcgagtcggccttactctcggaaaccagcagctcgcccgcctctcgcttaagatgtcgaaccagctgcgctcaacgacaagcagaatgagcggtcagccggatgtccagctcatctggcaagctctcgtcaactggctgacggatgagcatgggatgaaggacctgcacgtcgagtgcgtagagatgcctggtgcgtgtcctgcttgacggtcggccagaagagctcagcccgcggcctctcctccgcccgctccttcgctcgtcggtacaaaggccaagtgctgatcaagcatcgactgcctttcctctctctctttctccaggcgccggccgaggcctctttgtcacctcggacttcaaagccaatcctttcgcaccgccaccgccgcttatagcgatcccgacctcggccttactcaacgcccataccctcaagccgcactaccccaaggactactttccgccactctgggccaaagcccgcaagctcgatacggaggcagaggcagttaagcctctgctgcctctgacatcgaaccagctcgtgacgctgcaccttgcgctgcatcacccagagtcgaccctcgccggccacgacacgctaccgtcggacccgtgggcgccctacctccggtcactgccgcggtccttccactggcatcacccgctgacgtggctcatcaagctatctgacgaagatggcaacggcgagggcgctgccggcgaccgactgcgcgaaatagaggcttcgctggaaagtctctttgcgtgcttgccaaagcgcgcgcaggccctcgtgcgcgacgtcgagcgtcgtttccaggccgatgccgagattctgcgctctctcttggtgcgccgccagcgcggatcgagatgctcgctggctctgctgacgacgagctcgccctcggcacaggccacctcgccgcccttcccgtcgtgtccgacgccgcccctccgctccttcctctgggcctggctcaacatcaacacccgttgcttgacgctccacctcggtctcgggccggccgacggctcaaatgactttacgctctcgccgatcgtcgacttcgccaaccactcgccgtcagccactcccgtcccaatcacgctgccggaggaggcgagcacgcgcaaggcgaagcaatacgctctgcacgcgaccgaggacatggtcgcctcgcacactcgcggccgtaagaccgaagttctgcttcagtatgggccgcacgacgatgccttcctgctcgcagagtacggctttgtctgctggaaggacgccgatgggaacggcaaccgctggaacgaggctcgcgtcgacgaccttgtcgaggcgatgctgatggcgctgcctggaggccagggccacgccaaaaagcgcattcttgaggacgagggctactggaggtgagcttcggccgcagcacccgctcgtgcgcccgacgaggtgactgacccgcccttgcctggcccgcagcgactttacactacacctcgagccggcccccgcccatccatcttatcgcctacttgcggcccttcgactgctgcacacaccgctgtcgcaactgacagcctggcgggacgtcctcctcggctattcgccctcaatctcagccgccaacgacgaagccaccaatacttcgctcctcgcgctctgcgacgccgtgctggcgactgcccgcgccggccgcgagagtgtcagcaaggtcgtcgcccaggccgaggtcgacgcagccgatctcggcgagtgggcaggagcgctcgacagcgtccggaagctctgggagggccaggaggacattgccgagggcgtccgggagagcgtcgccgacggcgtagaattctagaggaaccggagacatatgagcatgcgcatcgcgcaggactctgactttgctgcgagtgcccttaagggaacagtgcgtctcgagcaccgccgcccgcaggctcctgctggcttgttgggcgagtgcgcgcgcgggcgagcgtcgtccgcctgcccggccatctctcttgcctgccgtcatcgacctgctcccgccgccccttgccccttgcccctcttccttttccagcccaacctgttccccaacatcaagcagggtcttcctcgggccagagaaccaccagccgccatgacgtcgtacgggaggacgccgcagctcaacagctcgggccgcgtcgcagggtgcgtccttcgcttcctctcctctctttgctctcgctctgagagcagctcagccccggccaagctccggcccaacctgccccctggctccggtcgctcgaagcttggccttgtcgagctgccagttgctatcgagagctgcacatgtgctgccaggaatctttcgaccgacagctggctgacctcgtcatctcctcgcccgcctcgtcgcctcgcgctcgccctctcgcctgccctccgtcaccgccgcgccgaactccgtgtcttcgcccgcagctacgaagatgactacgagcaggagacgccgcgcgtgcggggcatcgtccaccagccgacgcggccggtcgacaaggacaagacagagattgagctcgcgctgcacgtcaagaaggccgtctcggccgaggagacggcgccgaagcagaagcatgtccgcagtgcgtctggccttccttccggctctgccggctcgcatcgctcaccgccttgtatcgtttatgcagaggcgatcgtttactcgtgggacttccggacgtcgatccccgtctggaacgccatccgcgtccagccggtgctcgccgacgagatccagacgtttaagtcgcttatcctcgttcacaagctgctgcaggagggccacccgattgtgcgtctacccgagccgctctccgcttcgatctgacaacaccggtgctgatgatgagacttcacttccggctcggcgagggcagacgctgaaggatgcccaccagcagaccggctggctcgagacctgcggccggacggtcgctgccgacggcgccaagggtacaatcctttctctgcccagatgcttgcggccttgttctgacattctgcgagctgctacgttcgctcgcaggctacggcactctgatccgggcctacgtccagtttctgctgtcgaaactgcgcttccaccggcaccacaccgacttcaacggtctcttcgagtacgaggagtatgtgtcactgagaggtatcgacgatccaaacgaggggtgcgtctccttccacctcatcggtttgaggatacttctgctaactccagctcctcttgcccagctacgaaacgatcaacgacctcatgacgctccaggaccagattgactcgttccagaagctcatctttgcccacttccgcggctcgaccaacaacgagtgccggatctcggcccttgtccccctggtcaaggagtcgtacggcatctaccgcttcgtgacgtcgatgctccgggcaatgcaccgccggaccgactcgatggacgtgctcgagccgctccgggcgcggtacaatgcccagcactacaaccttcgcaagttctactacgagtgttcgaacctcaagtacctgacgggcctgatcaacgttcccaagctcggccaggtgcggccgccctccgtccagcctttctcactcccccgtttctcgcattgacctctctgctcgccttctcaggaaccgccgaacctgctcgacaacggctcgagcgcacccgagctgcccgaccggccgcggacggctgccccggcgcctgctaagcctgcgacgccgcaaccgtcattcccagagtcgtcggcggccgagatcgaggagcagaagcggatgttgctcgagtacgagcgaaagcagaatgcgctcgttgctgagcgcgtggctgctcagcggcggcagcaggacgaggccgaacggctcgagcgcgagcacgccgagcagctccggcttcagcaggagaacgagcgccggcagcaggaggagctccagcggcagcaggcgatgcaggcccagatgcagtaccagcaggttgaccagggccgccagcagcagatggagatggagctcctcggtatgcgcggccagtacgagcgggaccagatgatgctcgagcagtacgaccgtgtacgtcgctctcactttacttctcggcctcgcttcaccgctgacaccttttcgctttcgccgagccacagcgcgtcaaggcgctcgagacagaactcggcctcgtctcagcgaacgtcaacgcccagctcggctcgaaggacgagcttatcgtccagctccagcggcaggtcgaggaatggaaggccaaataccaggcgctggccaagctctactcacagctccgggccgagcacctcgacctgctcagcaagagcaagggaatgcagctcaaggccaactctgcccaggaggcggtcgaccggatggagcgcatggagaaggacgtcaaggccaagaacctcgagctcgccgagatgatccgcgagcgcgacaagagccgcttcgacgtcgaccgcatcaaggcgagccacaaggacgagctcgagcggctcaagcgcgaccttcggttcgccaacgagcgggccgacgacgcctcgcgcaataagtcggccgacacgtcgtcgctcatccagaagtacaaccggcagctcaccgagctcgaggactcgctccggtccaagcaaatgcagatcgacgagctcctgagcaagctcgacgaccagaagcgcgagcacgagatgcttatcgatgacaaggacgccgagctccaggtcatgcaggagagcctcgacgcgacgctccaggacctcggcgacgccaaggtggtgcgtgtcgacctcctgcttgtctcgacgagcatcaccctgacttgccatttttgctcgccgcccacagatctcggccgagggcgactcggccttcaccgcccaggtcgacaccctcatcctcgaccaccgtaaggagctcaaccagatcatcgactcgattcttcaggcgtgcatccagaaggtcgacgacggcatttacgagctcgagtcgccgacgcagacgggcaacactaatgcgacgcccgagtacacgctctcgattatcgagaaggcgacgagcaacgcgaccgagtttgccatgatctataacctcttcctcggccgcaaaaagggcggctcgcacgtcgacgtcatcaaggccgccaacgagcttgcccagtcgctgtccgaggtcctcgtctcgtccaagggcatcacgcgcctgacgtcgaccgacgaggcggccgacaagctcatctcggtcgccaagtcggccggcgactctggcgcccggttctttatgaacctccagtcgtacaacttggtcggctccgaggacgtcgcgctccgcaacaatgcgacgaccggcgccgcgctcgccggcctctccaaggtcgtcgagggtctcgtccagaccaagaccaactcgatcgccaagaccaacggcgacgtcggcgacctcgtcgagcgggagatgatggccgccgccaacgcgatcgagacggccacccagcggctccaggcgctcatggcgcggccgaaggactcaggccgctactcggcactcgacgtccaggtccacgacgccatcctcgaggcagcgatggccatcacgagcgcgatcggtcggctcatcaaggccgcaaccgaatcgcagcaggagattgtcgcccagggccgcggctcggcctcgatccaacagttctacaagcgcaacaaccgctggacggaaggcctcatctcggccgccaagtcggtcgcgtttgcgacgacgctcctgattgagtcggccgacggagtcatctcgggcacgcactcgctcgagcagctgatcgtcgcctcgaacgaggtctcggccgcgacggctcagctcgtcgccgcctcgcgcgtcaaggcgtcgctcatgtccaagacgcaggagcgactcgagctcgccgcccgggccgtcactgaggcctgcaaggcgctcgtccggcaggtcaaggccatctcggacaaggacgacggcgaggaggccgtcgactacaaggcgatggccgcgcacgagttcaaggttcgcgagatggagcagcaggtcgagattctcaagctggagaaggagctcaacgcgtcgcgacggcggctcggagaaatgcggcgtgccgggtgcgtccctcttgctgctcgtcctgctttctctctgaccgtcgctaacctgctctttgctcgcccgtcgcagttaccacgaggaggactagatcccaagattgccagctgcctcctttacatcatcgcttccctcccttttgcccttcggttctcgcctagttgtaatcgtatccgccccaccctcctgctcagactctcgtgatggtacggctttcatcgtctgctacctgtctcgatctatggcacggtcatttctcgcgagacgagaagggcattttgtgagtggcgtcggccgaaagaaagtacgcatgagagggagcggaccggcgtacggcgcagcaggcccgactgctggaagggaaggcgagcggctcgagctctcgccagcaccctcgaccaccaccaactttgacgcgccaagccagactcgccctagagaggtaccctccgacagtctctgcacccccgacccgctagctagaagcccactcgacagccacccgctcgcttgccggcacacagctcttctggaacggccctcacctgccactcggtcgctcggcaagcgcgctgccttcgccggtgagctttcctctcggcctcacacggtacatagcttgccctttcctgcttacaaacctcttcgctgacgccgggtactggatgagcagattcaaacccggtcgccatggccgacctcgcacccctcacggccgccggcgtggcactgccggtgtcagttgtcccagccccagcccagccggccgtcggtcctgccgccaacgctctcgaggacgtcgaaatggcttaatccgacaacggtgactcggatgacgcctccgacacgccggcggctccgcccttcccaattgctcctccctcctggaccccctttttctcgcgccagaaaacgatgtcgtcctcctctcggctgacggcaaggcgctcggcttccgacgtgccttcatcgaggcagtctcagacgtctttgagaacgtctgcctgcttggcggccaaaacaaccaggcgggcggcgtcggcaacgagatgcccatcatcccggtcgctgaggaggctgagccgctcgcgaggtttctcctcaacgtccatcccggtgctccagatcctccgatcgagaacttcgaccagctgaacacgtgtgtactttggttcgtgttggttgcttgacttccctgtgactcaagcggacactccttctcgccaggctttgcaagatagccgacaagtacggcgcggagtctctcgcccgctcggtgctcgcacttcacggcctgtacctcgtcgacgcgtacgagccagagctcttcgccctcgccgtcatctaccgcgttccagcactcgcggccgccgtcctccaccccaacgagtgttcatacgaaaacggcagatcgtgcgttctcgacgagatgccgtgggagagcgtccgccagcttcatccggccatattttatcgcttattcctcagcatgacgcgaggtgctctggctggcgggacatctgcgttgacttgcggatcgtgagcgcctcgtccatcacgctgttgcccaacctgaccctgacccgagctttctcttcaggaccgcacgtgttgaggtcgccacggccgaaaagaccattgcgaagctcgagaagtcgtacatcaaggagaagcgaagccgcaagtgagtcttctttgcccctcgctcatgtcttgtcatttctgctgacattttgcctttttccggcttgaaggaagatggcggcggcgaaaagtgcgactgtcggcgaggccgtatcctcggacagcgagccaccgtccgattcaacctcgacgacgacttcggacctcgccgcaccttctagctctgcaaatcttcggtcactggacgaggtctttcacgaccctgccaacgacatcaaggtccaatcgacgacgtggacgaaaagtctcaaattctcgaaggcgctcctcgccgctcaatcgctcgcccttcacgagctcgtcgaaaaagcagaggtgcctgccgcagacgtacgtaagaagagcaggaagaagctcgtcctgctcgacgtcccgccagaagtgctccaccggctcctcgtctacatgcatccgcagagcaaatataacctccaacccttccgcttgttcaagacccttgaagtgtgcggctgtcgtctgggtcttcgctcatcgtcgactgacgccccctcgtcatgcactaggttctgtctcgctggcgagaagtacgacctctggtcgaccgtccagcgtgcgctttcgaattacggaacctaccaccttgcaaggcacgcgccagaagtcctcggcctcgcgctcctctacggcctgcccgcacttgccgctgtcgccctgctcgagtttgacaacctagacgaccgcgacaacaacgtccggccaaagaagagggacgaccgcaccagttagtggcgggtgcgcgacatcccgtggcggcttgccaagcggctgccgtttgcggtccgcgtccggctcatccggtgcgagacggccatccggcggcaggactaccgctgcctgcgctggctcgacgtctccgtcgagatgcagagggtccgtttcttcctcctgcccttcctctttgcctggcgtaagcgtgtcggctgactcttgcctctgcgcccctttaggccggcacgcgctgggtcgacgaggccgacgactggctcgagggctacgacccgacgttcatgtttgagcccaacccggacgatcggccggacgagtgggacgagagcgaggacgagagcggggacgaggatggggaggacgaggacgaggagggagacgacagcgacgaagaggacgaggatatggccgacggcgatgtcggcggcggcagcgacggcggcgggcaggccgtgccaggtcctggagtcgatccaagtgccctgaatggctgactttcgttcggacagccggacggcgacgcagctcctcccctcccttgccttcctcaatgacggccgttgcccgccggtcgcctgctcgattatccctcgtcgacaccctcctcgctcggtcagcgtctccttcacgacgacgacgacctcggcaccctacgcccctccgcgcttcctctcgtgcttcccttcctgcccgactgcccgttatcgcgacccggccgacccctgtcggccctctcttcgtctaatcctgcagcctgccgtctctggcatgacccgaccgcaacgcacgactttgacggtcgctctccttctgcacgagcgaccctcccatcctctctccacgaccatcacgtccttctccttttcgtcgacgacgactgaccgtcctcgacccgttcgccgcggcccgaaggtgaccctgggggtcccgacgacgcatgacgtttcccccgcagcgcgcccgccaagaatgcgaatagctgggcgagctggccaggtcggccgttcgcgcgaggagggcagttagcggaaggaacgcccgaggatggtcgtgatcagctgttcagcgtgcgcttttttctctgcgcttgtctttgcgcccccgttcccccgacccggcgccgtgtgccctttggtcgtgcttgctggctggctggctggctggcgttgcgaggcgataggcctgcttgtggggtctccggccggttggtcccgtctcgccgggagtgcatttgcaagtcgcaacggtggctgggcggcgcggggcgattggtcgcgctgggctctcgtcgtcctctctcccctcaccgaccaccccccttcctcccaaggaaccgcccctccgtaggtcgtccagaagacagacggcagacgctcctcgacagcgccgttttgaccatcgtcgcccttttgctctcgctcgcagccctcctccccgatacccccctccgtctctccgagtcagctccaaagatgtcgccccacgacacctcttcgcttgttcacaacccggccctgctggcgccttacctccagctcgaccagggaggcaagacgatggctgagtgtacgtcctcatcctcccttcttgtcgggctgggctgggaggagagcgcttgtggccggatccgggaggtgcggcgcttgcggcccggtcgaacgactgcccctgcgaagcgcttctcccggttgcccgggggtgaccgaccggccttccctcctttgcaacaccgcactgacttgtcacctgccaacagacatctggattgacggcgacggaggccttcggtacgtctccgtcctcactcgagcgtgcaagcaagcggcccggtcggctggctcgctccctgctatggccttcggcgcctctctccgagccgccgggcctctagctcgcgcgggcgactgcacttgcaacttgcgacgctgactcgaccgctgttcttgccgcccatcgtctgcctccccctctctctcaattccaacgctccttcctctgtcgccgtcaaatcaacctctccatctcgccgctcgctatctgccttccaactgatcaggtgcaagaccgccgtacgtcctcctcgtttcagtctctgcggcgggctcagccgccggacctcttcggccgatatgcccttcgacctggtcaaacgactgacccctcctcctcggtgattcgctcgacagactgtcgacaagaaggtcgagtccgtctccgagctcaagggtgcgtttcctcgagatcttttggcgctgtcaaaggggccggtgacgagaagcgtgcctccgaacacgaccgagcgctactctctcggccctcaggatgctgcatcccgctcgctcgcctagacccatctcgtctgacgcgaccccttaccctcctgcagagtggaactttgacggctcgtcgaccggtcaggcccccggccatgactcggacgtctacctccggccggtcgccatcttcaaggacccgttccgcaagggcgacaacattctcgtcctctgcgagacgtataacaacgatggcacgcccaactcggccaaccaccggcaccacgccaacaaggtgatggaggctgtcaaagctgtgagtcgactcgagcctttgtgacgccagacaaggacagccctggctgacaggcttctcttttccctcgtctgcagcacgtcccctggttcggtctcgagcaggagtactcgctcctcgactctgacggctggccgctccagtggcccaagggcggttaccccgcgccccagggcccctactactgtggcgtcggcaccggcaaggtctttgcccgtgaccttatcgaggcccactacgtgcgtcgcccttgctcactcggccagtctcgctcgattgctgacctgccttcccttcagcgcgcctgcctctacgctggcgtcgagatcgccggcatcaacgccgaggtcatggcttcccagtgggagttccaggtcggaccgtgcgagggcatctcgatgggcgaccacctgacgatggcgcgcttcctcctccaccggacggccgaggagtggggcatcaaggttacgttccaccccaagatcttcaaggatggcgactggaacggagccggatgccacaccaacttctccaccaaggagatgcgcgagccgggaggcatggcccacatcgaggacgccatcaagcggctcgaggtcaagcaccttgaccacattgccgtctacggcgagggcaacgaggagcggctctcgggcaagcacgagactggccacattggcgccttctcgtggggcgtcgccgaccgcggcgcgtcgatccgggtcccgcggcatgtcgccgcccagggctttggctaccttgaggaccgccggccggcgtccaacatcgacccttaccaggtcacgggcatcatgtgtgagagcacgctgctttgaaggctgctagcgcctattgccagctgccctcttcaactttgtacccccatacgatagcccacgccccatcctcttcgctccttccgatcctgaggctcccacttcctcaccctcacttttttttccctcttctctcgctctgaactgggggcccaaccgatgacactttctctctctctctcactctgcttgtcctgttgaaagtggcattccgcgagtgcgccaggcgagggtcagagaaggtggttcaggtcggctgcgggccgcgtgcgagagactactgagttgcgttgcgcccgatcttgaccgtcgtctcgaccgcaagtcgtactcctcacagagaggtcagaggcaaggagtggacttcgagtacaggccgagatcttagagagtgagattggaggagatcagggctgcgcgtgtcgcagggcgagatatggctctggccgccgaggctgcgtctcacctacttgcgcagttcagccctgacaggaagccctcttgcaggtcagctcgtctgcagagtggtgccgtcgactgccgccctccaagtactctgtcctctcagctcgcgcgacatggcacggccgcttggtcgccagacctgagctgccgccccgccacacacacgtttcgtccaagaggtcaacatggaaatacgactgaacacattccgacagagaagatttgatctacagcgctgcaaagaggtggctgtcaaagaggcaggaaggcgggacatgagtggacgggcccggaagggcccgagctaagatgcgtaggccggccgacgcgatctgcgagatgcggccgtaaccggcgccagagggctgagccggaagatcggcagatgagtgatgcgggaggcttgcagccgagagggcatgggcctcactgaaagggtggctcggcagagccgttggcgaagatggtgagagcagaaacctgcagacatagagcaggtcaacttgacccttagtaccggcgcgagatcggacaaacacacttttaagttgaggctcttaggcgacaccacccagttgcgcggcgttcaacggcacgctcggtttccgttcggcgacgctgtcgagtgcttgcttccgcccggagatcagagaggacgcgccgccggggccgccggcgccggggtgctggaggtaaccgaaatccggccacgagggcgtcgcgccggcttgcacgacactgctcggagcgagcgtcgggttgaggccggtccggacggccgtccctgacggcggtcggtcgggcaaagcgtgcgtcgacgccgaaggtggcgaaaaggtgatgccatgcgtggacggtgaccgggcgggcgagatgaagagcggcagcgacgatggcgctggagtgagcagaccggtcgaaggcgacggcggcgagagccccggatgcgacgaggccaaagatgttgccgtcgtcaaggtcaacggggacgccgccgctgccggaggctcggccggatgtgcgtgcgcgcctgctctgtctccaggatgcgagaaaagtgacgaagacgacgagtctgggtcaccctcgccgcccagaccaacgcgattctctttgccagactcgccgcctgtcgaatggccgcggctgccggatgccttcttgtcaaagccgccgccgccgccgccgccgccgctgccgaacctagctttcctcgggctgctccgttgcgaaccctggcgtgtcaagggctgagaggaaggtccggcatcctgcgacaggccgccggtagcgtaagtcgtgcccgagggaccggtgttggccttgctaaatgcgccaaagccgccacttccgggctcgtcctcgccaaagtgtagcacacgacctcgagcggacgctggcggcggaggcggaccggtattgctgaccactcgaggccggggcgtcagccgcggcttggccggcgacggcgagtgatgaaagaacatcagcatgccagctgcgtcgtcttcgccgggcgcgcccgtcttcgatggtcgacgggtcgacgatggcggggtggtgcttcgagctcggggcggtagcggctggagggacgaggcgcccgattcagagggttcggtgctgccacgatgtgatgaggccgaaccggtcgacgtgagcatcgccgtcagcgcgctcgcagcactaatgtcggccaggttggtcggcttgccgagctgagccggggctgacggcgggggcgatcgttgtcgcttgcgcggcgagcgaccgggggatgtatggtgcgacaggtactcctcgacaggacctttcgcttgcggcgatgtgcgctgggcattctgaaagttgacgacggccgacagggttgacgagacggtccggcggtggccgcggacgagactgggcataggctgaccgcttgcactgccctcggctttgggcgagccaggtacgccaacgccaccgagtcgctgccggtgctgctgcaggcgcgacggcaaatgcgccggcgggccgaatcctggcggatagtgtgacggcactggtgcgccaagcggcgaggggtaggcgacggctcgcgtagggcctgccgaggagagtgacggtcgagcgacgggcgcgcctgacgatattgacgtccgggccgacgagatcttgggcgacgagttgatgatgggcgaggttgtaagaccctgcgcgtacgagtggttggccgcggccgccgccgtgacttgcggacgcgcgaacgtcgccgacggcgagcgaccaaaagagccgctcgagcctgggtagtgtccgcctgaagacggcacgcgcaggccggcgtcgcttacaccggcagcaagacgtttcggactcgccgccgccagacctgcggccgatccagcgtggccgcgcatagacgacatgacgggcgtgcttcgtgcttgggccgagaacggtgccgcaaaggaggacgcgtcggggtctggcgacgcgtagaaggacggactcgcgggcaagtgcggccgatacgcgtcgtacgggtcgtatatgccgccgggcgagccgcggtaattttggtatgacgacgaaccagctgacgagggcgcgtagccgtacgccatgccctgcggcagcgccgtccgaggcgaggccggatgctgctgcggtactggcggattgagcatgacctcccacaggcttggcttgcgctcgccctcgtcgcggtcgccgagctggctctggtcggcggcgccggatgcatccgaggccggcctgcgagtcttctcgaccggctgagacgcctgctcaagctcggcggccgacgccttgcgctttcctgcgcgaacctcgacgcgtagtgcgtcggcgagcggcaagtcggacgacgacggcgccggtgcagcagacgtcggcgcgagcggcgggtggtcgactgacgcggctgccggctggaccttggacgacgcctgagcaaggcgagaccggatgagctgcgctcgctgcagacagcgcaagaggagcggatagccggcaagaaacaggtcgcgcgtgtcagtacggccgatcgagaagggatggagacctctcagaggagctcagagggcaaccgacgcctgacgactgctgccgcgccatcggcttccgcgaggtcaccggccctctcaggagggacgcgatggcctggcctgcccaatcgagcgcgacctagcatcggctagcatccagccacctgcttgcacctccagtcagtcgctcaggaggcgaggaagacggtgagaccggccttcgaagcctggccagaggcgagaagcgacgacgcgcctcgcgccgacgcttggcgacgcgttgcgctcgtagaggacgcacctttgagatctcgagcttctggaggaaggcaagggcgacggggtccgaagcaccctccatcgtaggcgcgggacagcagcggagccgaatttgtgaagagcaaggcccgggaggagtgcagtgaaggaggacgaggttgggaggacgaggctcgcgccgaaaagggcacgcgtcgtcgtcgcggctgctgcagccgacggctcgacggatgggtaggcaaggtagggtcgagtgcaggtctctcactctcgcctctctcgggtcatgcgctctgggctgaggtctgttcgcaaatcgaccgcccgtgcccatcctggccgacgtgcacgggaacgcctcgtcgctcgagatgagtgacagcgacgcgcggcgcgtccgacctggttggtgctagagctggttggacgaagagctgccgtactggatcgacttcgtgtcccaaaatatagtcatcattcctgtctggggacagctcgtgcccgtttgacgtctgacaccaagctgggaggcgctggtatggctcggtcggatgtgtgcccgccgccatgacgtcctcgagctctcgctcggcgtcggagttctggccaaggccctatccgaccagctggcaccaggtccggctagcctgcatcgttctgactctcagagagctggccgatttctctcttaagcattcgcggtccagaggagcgttggtaaatgccgacctcgacgtcgtcatgactcgtcggacccgtcgtagacggccctcgcgtgcccgtcggcgcgtcccggcggaggccgatgagacgatccataaggtgggctgtaagtgccttcacgtcttcaaccctcgctatcgacctctcccacttctcagccaccctggcagatcgcagcaaaacgcgtagacggacgtgattacccaagacttggtgagtcactgctacgagacatgctggacgctggcccggctcgctgatcctcttccctccttcccgtccagcacctcaacatgtcgacctcaccgacctctccacctccgacgccgacgctccgcctccggcctgcgacccgcgccgacctgcccgagctcatccgcatgcggatcgaatgcggctggaacgaggatacaattggcgcttacctcgagcgagctctgccaaagacaaccgacctgctcttcctgttcgagacagccgaaggcgagccggcaggaatgtgcgttgccctgctggtgccgctgaccacttgattctggaagggcatggcagggctgaacgtctttcttgatctgcgctggacaggggcgcgctcgagctcgagaacgatgacccggatctggcgagcactgcgactgggaccgtctgcctcagtaggtttctccttcctgtcgaacctagctcccactcagaggcgcagctcactctggaatgttcgcattcaggctggctcttcctgtacggccggcatcagggctcagggaccggcaacctcgtccgtcgcctttcttatctctctctcgtccgcacagccgcgactcatcctccgcatctcgctcactccaaattccccttatccttcccggcagatggtccgcattctcgaagatcacgcccgtcagctcggtaagaggaccgtgacgatccacacgcgcaagtgggcgagtcgcgactgggacgacaaggccggcgaggtctcgcgaaacatgctctggtacggccggcacgggtacgaggagttcaaggtacgcggtctggctcgtcatcgcttgatacgctccgattgctctgccgtccaggtctgtttcggcgagttgacccagaagacttcctttctctgcggatagcccccggccgagcgctaccagaaagacccaacgacccgcctcgaggcgtgcttcatgcgcaagtcgcttgatgaccggccgttcaaagcgtcgggctcgtcaatggccgtgccctgaaagggcgtttggaggggtagcgatggatgacgatgtagaatcctgtcgcgcggccggcctcaatggcaagcggcttccaaacgctggtcgttgaagagtcgggtgtgacacggccctgacgccagcggcgagatctgaggacagagtactcggagggcggcagtcgacggcaccactctgcagacgagctgacctgcaagagggcttcctgtcagggctgaactgcgcaagtaggtgagacgcagcctcggcggccagagccatatctcgccctgcgacacgcgcagccctgatctcctccaatctcactctctaagatctcggcctgtactcgaagtccactccttgcctctgacctctctgtgaggagtacgacttgcggtcgagacgacggtcaagatcgggcgcaacgcgactcagtagtctctcgcacgcggcccgcagccgacctgaaccaccttctctgaccctcgcctggcgcactcgcggaatgccactttcaacaggacaagcagagtgagagagagagaaagtgtcatcggttgggcccccagttcagagcgagagaagaggaaaaaaaaagtgagggtgaggaagtgggagcctcaggatcggaaggagcgaagaggatggggcgtgggctatcgtatgggggtacaaagttgaagagggcagctggcaataggcgctagcagccttcaaagcagcgtgctctcacacatgatgcccgtgacctggtaagggtcgatgttggacgccggccggcggtcctcaaggtagccaaagccctgggcggcgacatgccgcgggacccggatcgacgcgccgcggtcggcgacgccccacgagaaggcgccaatgtggccagtctcgtgcttgcccgagagccgctcctcgttgccctcgccgtagacggtaatgccggtggattcggctatacatcctcggtcggcggttgaggacgagaccggcatgaaaagcgcagggtcgactctcgcgtccactgcaagggcaattcagctgcaacgactgccacggcagcagggaatggctcagtgattcaatgcagcagttgcttggaccggaccggtgtctatcggatcacgatgggggagaaaaacgaggtcagcagttgtcctttgatggcctggcaaaccgaacaccgctcgtcgaacccctcagaatcgccttggcgtcccctcgaccaacaaaggactcccctgtgagcccctctccaggcagcaacagtttagccggccccttctgtctggtcctgagccactcaagcagctcgggtccagaataagacggggccggccgacggaggagggagaaggaggggaggctggtctcgtgcggattactttgtctatccatcatcgaggtctcgtcacggtcttcggtgagcagagaggacgtacacggcacgaacgaccgcgttgccaacgaggcgagccaaaggggttgccgtcaggctgcgagctggtcgacctggcgaagtctgggcagaggctgctggcgagcagacctgctctggcgctgccctcaaccgtcggccggtcaagtatggagacccaaggctagtccggtcagctaggcagtaccctgcttccttggagtattcagggagctgtcgctggggctcagggcgaactttgctagtggccgttcggagggagcgagctcggctgcttcgcgccgctgcgactgccgccgctgctcttccggcagacgtcgaccgtccctgcaactgcttcccctctccatctcgtccagcacgcgtctgagcaaggacaaatagctctcaagaagccatcatgaccgacaacaagcccaactttgacattgacgaggtgcggccgatgtccatctcggctcgtctgcccctgccgccgctacgggagtcggctatcgcctggcccgaccccccttggagctaccgaggcatcgtcggcccttgtcgatgctggttaaccttcattgcttgcctgcctgcagatacatgcgtcgctcactgctgcctatgaggcgcaggtgattctgcctgtagaggcgcggatcgctcagctgcaggcgctcgcctatgccgtcgttggttcgtccttcctcctcatctctctcttcgcttcaaccgatgcagtctcgaactgagcgaattttgactgctctcttcgcctacagagcacaaggaggagctcgccgaagctatcaaacaagacgtcggccagcacccgatggaagtaagcccgccagctggcccgactgcgcagcgctctcgcctgccgacttcccttcctgctgggcggccgatgctgactgcagctttcgttccccaggccgagtacacacagatcaacccagtcatttgggctgcgacggactatgtcggtgcgtctgtagcctgatagcgggtcgcacagcagctcattctcgcaatcgcccgcccgcagacaacgtccagaagtgggcgaagccttactcgctgacggccaagcacccggcgttcctcctttactcgaccaaggtcgagcaggtcccgcgcgggccgtcgcttatcatcgggccgtataactacagcctcaagctcgcctttgagccgctgtgcgctgccatcgccgccggctgcccgagcctgctcctccttagcgagggcagccgcaagacgggcgaggtgatgaagcgcatcgtcgaatcgacgctcgacagccggatcgcccgcgtcgaggttggcggaaaggatgagggcgtcgccgcgaccaccaagccctggggcagaggtgcgccgacaggtctcgcccttaactgcttgcggccagctgacacccgttcttcaccctgcgttagtcgtcttcactggctcgaccaaggtcgggcgcgaggtggccatcgcttgcgctaagacgctcagcccagtgaccctcgaggtgggtcccgtcctttccctgagcttggccgtcgactgacattcaggtcttcctgcgcagcttggaggccagaatccgagcatcgtggacaaaacggccaacctctacctcgccgcaaagcgaacgctcgtctacaaggtcctcaacacttcgcaggtgcggcaactcgatcctcgtcgtagatgaccgccctcctctccctgactcgagcgccggattcccctcgcagacctgcacaacctcaaaccacaccctcatcccgacagccctccgggggccgtacgtcaagcactgtcaggatatactcgcctcttggttcccggagggcgagcttgcgtccgactcgtacggcattctctcgcgcggacggattgagtacctctctggcctgctcgacaaaacgcgcggcacgatcgtccgccggggcgccgttgacctcgagcggggcaagatgggcgtcagcatcgtcaccgacgtgcccgaagatgacggccttatggccgaggaaatatttggcccaatcgtcgtcatcctgacgaaggaggtgagcgctgtagtcttgagcgtcaccgaggcactgctgaccgtaccgttctcgtcctgcccgccacagacggtcgaggaagccgtcaagcacatcaacaagggcgccaacccgctcggcatctggatcttctcgagcagcaagaagacgatcgactatggtcagtcgacctctctcaatgtagcaggacctcgagacgctgagtctcgctttgctttgtccccggtagtccacaagcacacgctctctggcggcatcatcacaaacgactgcgcacagacggccttggtcgactcgatcccttttggcggcgtcggcgaatctggccgtgcgtaccgctgccgctctgatgtcgtctccctcacgctgacggcccctttgccctctcagacggctcctaccgcggcaagtggggcttcgatctctttacgcacgagcgaggtacgatcgacgtcccgacctgggcagagccgctgctgtcctctcgctaccctccctacgacgtaagtcgacgagcttgcgtcttggtcacctgatctgccctgctaatacctaccgctccctggccgccgcaccgagcagaagttcaagcgtttcctcttccaggccttcctcctgccgcttccgctaccgttcccgaagcccgggtcaacggccgtcgagcgggcgaagtggtggacgctcaattggtggcgcaaaaaggccggctggaaagccctcggcctcgctctcaccatcctctcagtcgtccgtgccctccgggccggcgaggtcagcgtcgtcatcggcggaaggcagctcgtcggtcgggcgtgagccgctcttgtttctcgtacgacctcgtctgtgaatatatgctctcgatctcccgctaaagactggccgagccggaggtacatgtcgagtggctgctgcgcgtgatcggcctcctccagcccttgttcaaccgactttcggctcttcctcgtccctgccctcctccgtcggacttacaggcgctctcatcaagaggcttcaaaactgccatccgagagcatgccccggcgagacgagactgagcttcgccagctgtttggccagagagggtcgccaagcgatggagtcagcagcaggcccggtcgctcggcacacgtcggctctcgcctgcctcgcaagatctctcctgacctccatctacactcgaagcactatgaccgacagcagctccctcttctcggccgcaacctcgcagcgtcatctgcttgacgacgacgacgacaactcctcgctcaagaccgagcgtcctgcttccgtttacacggccgccacggtcggcggctccggagccgaagacgacgccctccttcaaccctttgatcctccgctcggcatcttccctcaccgacgctacgtccgcggcgaagtcactgtgctcgagtacgccgaagccaagagctcgatcagcgggtgcgttctttccaagcgtttcaagatgcaaggctgttctcagccccgcagcccggcccggccagttgacgacgaccctgccttcctttcgaccgaccgtctctcagggccgacgtcataattcgtgacgttagacgcgatcggcctgtattcgtacgccatgcacccccgatcttcaaagccctcatgtccaacaaggagttccgcgacgcctcgacgggtgagcccgtcctcgacctcaagatgacctgggaagcaacgtccggccggacagtcatgtcgggcaaggatgcggccggcgaagagatcctgcgcctcaagtccaagacggtgctgatcaaggccaggctaaagaccacttttgtcaaccggctttcgggctcgaacgaggaggtcgtgctcaatacggcgggcggcttcacaggcaagaaagacgctcgcatcgagctcggcgacacgggccgcgccgtcgccatcatccgtcgtgcgtcaacatggtcggcgggcgcgtggctgctgatcaacggccaagtatgtctttgcgagggtgctctggtaggaccttggtctgacgaatgcgccgtgctgccagtttcacgtctcggtggcacccggcgtcgacctagccctcattatcgcctgctgcaatgcgtttgacgagacgcgcttctggggatgaagatccgtcttcctccattccgacctgtctcccgctggtttctgcgtcctgctggcctcggcgcggtgacgcatgtccgttgcgcaggcgcccccgccggccgacgtcgtctctttcccttgctctcgtcttgttatacttcttccttactgtatctcacgatccactctctcctgcctcgctgctctcaaactcccgtcgctgtcgagggcccggcgtcggttcgagtcgaacctgctcccgtcgtgctctgccggtgacgcgtttgcccgatcggcctcagccgacggttcgtccaggcggaggctgctctcggcccgccctctcgcttcacttcccctccctcccatccacattctcaaacaattttctctacagcaatcatggagtacgagaccgagtcctacctcggcgccacttatgctgtcggccaggtgcggctctcggctgcgacgttgtggtcgaccctcgtccctccgaccccgggagggcgggacgcgtgggctgaaggataactcaactgacctcatgggccacctctcattacagggtgtgcttgctgccaccctggtcatcctcgtcggctacgtcctgtctgggacgtcgctctttgggcccgagacggccgtcgtgagtagaatcttgccgcatgctcgtccatcgcgtctggggctgaccgcgcccgttgttctctctcatcgctggcacagggcctccgacggctggcgaggtccatcctcctgcccgcactcggcatcgccattctcggctcaacgctttctgttcgcacccttcacctatgtccgtcctccagccgattgcgtgcctgtattggctgccaagagctgacagccgcatcgtcggctcgccgcccgcagactggccgatcctcctgatcgccgtcgtctcgcatctcacgagcatcctcgtctcctacgtcgtcttccaccggctgttcgccctgcctggctggatcgtcagcgccatgtcgttcaactcgtgcgtcccctcaatgccgcccatcgcagagcagaaatgcagctgatgccaacgccttgcgacttcgtcagcgtcacgtcgtttcctctgctcgtctttgccgcgctcgggcttgtgccttcggtgctcgagcatctcgccatgagcgaggtcgacctgactgaggccatcatccagcgcggaacgacctacatcctcgtctttgccttcgtctcggacctcttccggtgcgtcaacccaattagcctcagacagcagatcagcagtcgcagcagcagctgacactcaaagctcattgtccgctagcgccgtccttcgtcctctggtcaagcggtctgtcaaggccccggcggcgatcaagctcgatggcgaggagggcgtctcggcccacgtcgccgaggacgacttggactcggccaacattgctgctgcctcgtcatcagccgacgagcggacgccgctgctcgtcccggcggcgcataacgcccccgtcgcccacgtccggccggcgcattggacccacaagctgaacccgctcatcattgcgggcctcatctcagtcgccatcgccgtcatcccaggcgtccaaaacttcctctttggccctctgaccggcggtcagcgcaacgccggctgggtcggtgcgacgctcggcacagtcctcgcttggctcggcggctcgtatgccatcattgagctcctcggcgccggtggcgagctccgcttccgcgaccagaacgcccagcaggagaagacgctcggtgccgtcctcagcatcaccttctggcgcttcgcggccgttcctgcgatcggcatcactgctgtctggggcctacagcacctctcgccggctttctacccaaaggaccctgttcttgtacgtcccctctctccctttgtaccggtctctgctgtctaaagtctcaccgccctcaaccactggcagaactttgtcctcgtcctagttttgacgacgcccccggtcctcagcattattacgacgacaaccacctacgagaccatcacccacctgagcgtctaccttctgacgcccttcgcggtgccgttcgtcctcgcctcagctctcaccgtctttggccacggcgtcgagtttcacaacacggttgacgtgaagaaagcgctcaagagcgcggccggcggaggaatcgccggtgcccttgctatggtcatccaagtcctcgcgcttatgccgctccggaccatcatgaactaccgtccgtcatccttctctctttctcctgcagtcatcgagctgacccccgcaatccatctttcagagtaccgctttggtggcagcctccgaaacgccagctccaccctctgggccgacggcaagctccctcgcctctacgccggccttcttgccgccctctttcagggcccgctctcgcgctttggtgacacggccgccaacgccggcatcatcgctctcctcgagagcatcgagctccccgtcctcgtcaagactgtctttgcgagcgctgcgagcgccgccttccgcatgacgctcacgcccatcgatgcgctcaaggtgcggcccgtcgagagttgccgtaggcttggcgcaagctgacacctcggacctttccgtcctctcgagcagacgacgcagcagactcagggcggagtcaagggtcttcggcttctcaaggagcggatccgcgagcagggtgtcgcctcgctctggtcagtggcgcagcccgtgtcgaagcacttgcactggtcacagcctgctgacgcttccatctcctcaggtatggagccattgccaccgctgccgccacctttgtcggccactacccttgggtgagtcgatccgcgtcgactcacaagcgagtacgagactgacatcgactcctcgccgcagttcgccacgtacaacgttctcaagcagtacctgcctccggcgcactcgcttgtcaccagcctcctcgtacttcgtcattctctaccgtcaagaggggtttcgtgctgacaagcattctctcatcttcgcccccccccccgcagaggcaggcattcatcggcttcgccgcgtctgtcgtatccgacacttgctccaactcgctccgcgtcctcaagacctaccgccaggtccacgaaggcgacgtcggctacggtaagcgcctgtcgcgctcatggcctctgacgcctcagactgacgcctctctgctgcccagtcgccgctgccaaggagatcatcgcaaccgacggcatccttggcctctttggccgcggcctgcggacgcgtatcctgtacgttcagcgcggctgatctagaccgcttttccgacctagcgcgctgacacacctcacacacgctcgccactcaggaccaatggtctccagggcctcctgttcagcgtcctctggaagctctttgccgacctcatcgccggcaagaaggacggtcacggcgtttaagcgttctgaatacgcgccccctttcggctctcagccctcaaggttcgctatccgtgccaggccgtcttcctagaccccaccggtccacctactccccgcacgacccatcccgtccctctcgttcaaccgactcatatcctcgctcgcaaagaccttgtatctatgatggcccgtcccccttgctctcgcgcgtgtgactcgatcggaagtcagtcatgaaagaagtcgtacaacacctgccgctcatcttcgtcgtatgtacgccgcctcgctcgagccgcgcggaaaccggccctcgcccagcaagtcggatgtctaggccttggcccagatctgcttgagcgccatccagctcgtgatgacgccgagggcaccgaccttgcggtcatcgagcgtgaccagaccgaggttgttggccgggatgaagaggtcgaggctatcaaggagcatctgcgagccgagctgggcgcgctggctggaagcgcgacgagtagagcgtatagagggtcagcgaccgcgccgtaaggagggcaaggcagcgtgtacgcacgcgatgaggcccttggtctcggcatccttctcgccccgaacgaggcccgaccgccgggcctcacgtcggacgcggaccatgccggcgccggacgaggcgagcgagaggaggattccgccgagccaaagccggttcgagagcgtgctgatgtcgacaactttcttgggcgtcagtcggagaaagcgggcgtattggagccagaggaccgagtcggtcgcgaggtagccgctgagaattgccgaaggtaagcacgatcagacgtcagcttcacgagccatggctgagcagagaggaccaggacgcacaagtaggcgagctggcgcgcgatctgggtgacgcgctcgacctcgaccgaccgaccgagggccgtcgacaggtcgtgcctgtgagatgcgaccagggcgaacgaacgttcagtcagcgccttagcagtccggctcattcagcagccggtacaacactgacgaaggcttctgggctgagagcttgatggcggcctgggcatgctcgagaggcttgccgatgcgcatgactgcctcgccggtcgtcgtccgcagcagggcgccaggtgtcagccggccatgccgctgtagcacaaggcgaatgacgcggcaaaggcccgagagcagactgggggcgcacgcttccggcccatggcgagtgcggccttgagggccgtccagcgggcggcgtcgtcgaggcggccggcgcggagcatgtagcccgcaatcagccggctcgcatattggacgaggcggtagagctgtgggcggcggcggacgcgtgtactctattagtcgcgctccggcaatgaggttcgaaagcgcggccgcaccttgtcgcgcccgacagtcttgccgaggacggcgagcgagcgcgagacggccgggtggagaagcaggtgggctgggtagagggcgagcgagctgtgtgcgggggcgcgattgtcaggcctcgatcggggatggggtgtaatgcagaccgacgtacgccatcgtcctttgagtgcgagtggtgaggaggatgggtcgtggaaggtgatggtcgacggagaggaaggggcgacggggccaagagcatcaagcaagcatcaagcaggtcgggccggcacgggaggcggcgagtaagcgggcccgaaggtcgagctcggcagcgacgtctgcctccattcctcaagtcgagctctttctcgaaccatggcccgactgagtctcagagaggctgacctactgctcaaggacccgctgctgatcccgttgctgaggaagggaagccgagagggaagcaggctgccctgcgctgcactcgacagactggcgcgtgaccgacgcccggccgccgtcatcgaccctcggaggcgcctttcgacctgtggctcgacctattcccatcggccagacagggtgcaccaggcggcggctgtcgactctcgccagatgaagtcgtgcgatcatgcgctcagcagagttgcttctgctgttcagctcgcgctttgggccgcacgcagccgctccttcctgcaattgcttcccggagcaagactccttgcaaggcgaggtagcattacacaacacgaggaccgacggcctggctcaatctctactgatatcacttgaggcggcgagcgaccctacagccgacccgagacggccggaggtccgcccggcgcggcctcccagaagccgctatggctcgcgacctcggagacggcccgaagcgagaagcggccgacgtcgagcatcgactcggcgaaggtcgcttgcgagtaggcgttgccgagcttgtgcgttgccggtctagaggtagagcggtggccaatgtcagcgggcagcagcaggtggtcagacgagcaggcgacagggatcgaccgcaggcccgtttgcgactcgatgccagcggagacgatagaggcggcgaacgcgagcttgagcggctgccagacgaggttgaagatgcccatcgtgcgaagtataggtcgggagctagcagaagggtttgagagaacgaggaggtctgtgagagttggaaagggcaagcgaggccaagctgctcccgtctcgactcgtcgtcgtcgtcgtcgtcttgtccccgagggcggagtctcaacgggcctgaccctgaccccgagctgccttccgacctgacggtgctccgaacctcctcacccatcaagccagaccttgctctctccaggtcagctcgcagtcgacctcttcccgccctgttgaacggcttccgcttcaagctgggtcaagaaaacccctcttctgccttctgtcggcctcctccggcccgaccccgtcatcgcctcctcgaactcgatgaaccgggctcccgagcagccctctcatcacggcttcgctcagcctgcctagagactcgtaagttcataggtgtggctcagcatctcgagtcgcaagtgctcatgctcccatcttccctcccggcagccatcccggtcggcaccgcccatctcggcccgtcagccgacgaacgccgccgaaccaactcatcctcccagtcctcgcaataccagcattgttgaacccaacatgctcgaactcactcctgtcagcgtctacgtgccgcaagaggtcatcgatgccatcgtcggcgagtcggccgacgaccaagcgacgctcgccgcctggtgtctcgttagccgccgtttgtgcgagtcggccggaccggtcctgtacgccgaggtccggctgactgagcgcaactggaaggcctgcctctctaaatcttgtcaagaggtacttctccgtcatcgacagcaggcgagctaagacgaggctgacgaccatctctcttcccttacttgcggcgcgcagcagttcccgaccggcaccgctgaaacagcgcggcccgccttcacctgctctcgtctggcgcacgccctctcgttcagctctctccgtcatctctcgattccagtttcagtcctccctctcctcgacctgtcaaagatctgcaagctcgcggacgccatgcgccgacggctgtcgtccaacctcacgctcaccgtcctcgacccaaccggctcggcgctcaagaccttctgcgctcacgccggcccgctcatggccctgctcaacccttccagggtcgtcttcaacctcgaaccgatcctagacggcactcaagagcccccgatcggcctcttggacgtgatcgagggcgaaattctgcgcgacttcaagagggcgctggtagcggccgccgtgagcgagacggcaacggagtctcacgcggccgagcgcgagagcgacccccccgcgatcatagacgaggcatatccggacgacgacgctcctttggcgtgctctgtgctcctgcagctggcctgcgcatccgacgctcaccgactcgccgccgaggagcggctcatccggcagctcaagacgtgcctgcgcgtcctcacgctcgccccggcctttgcgaccgacgatcggctcatccgcgccttctttgccgacgtcgagccgtgcgaggatgcgtttgaacggcgcttcgtcgacgtcccgtttggtcgcacgggctggctacgggtcgcgcgccctcagacgctggacaggaccgccggtgcgtcccttctaggttgactcacctttcgggctgcgctgacgtctcccctcgacacggactgcaggctgccggtcaaccatggattggtggatgacacgcctcggccagccaccgctcctcgacctgtgatttgccgacccccttttctcatccctcgctctcatctctgctgtcccatctcaccctttgttccctcccatcgacattttacctgctagaaccaagaatgcgaccatgatgtgacccttgccgcaggatcactgcgccagcagcgccgcccggtacttctcgcgcgcaccgtcctcgactttgcgccggccgaacgtgccgggcagccagtacagcaggtgggcccagcgatacggccgctcgggcagccagacctgcctgaacctgagcgactgcgcatgatcttcgctcgccggcgcacggtcgaccgcctcgatcacgctcgcagcgaccgcggccggctcgaggctgtacttgctcggcggctcagcgttggcgcccttcgcggtcgaggcgtcgacggcgcgagtccgaagcgacgtgttcaccgagccggcgaggatctcgacaaactggacgccgaggccgaggatgtcgctttcgagcgcgagcgaggcgaggagagcgtgtgaggcgccctttgaaccgctgtacagcgtacgcgtcggcgttggcaggacggcggcaacggtcgagaggaggacgacggtaggttgaaccgagtgggccgagagtaacggaaggaacgtcgcatacgaaaggagcgggccgagataattcgtctcgatcgatttcctgcaaagccgcgagacgttgcgcaggctgatcagcagcatgtcggaggctacgcttgagacgagtgtcagaaggcttcgagggcgtaccttgccagatcgaggacgctttcgaggccggccttctccgccggcgcgaaagttgcacgagctcggttgttcagccggccggcagcgtcagaggggtcggtcgagagggcggtcggaggcgaaccggtcagggcagcaaacgtcctggtcgacaggacaccggcgacgatgtggacagagtcgagtccgccccaggcgtcctgaacggcctgccggacggcaagcatgctgtcgacagacgtgaagtcgacggcaagggcgagcactttagcaggcgctgcgactgctgcgctgacgggtccagccgagtctccttcttggacggcgcttgacgtcgctactgattcgaccaagttcttgcacccagctgcaacatcatcgagcttcgactgggttcgtgcaacgaggcagctgcgggacacggctcggtcagcgctctggatccaagcgtaagacggggctgcggcccctcacagcagcatgagctcagacacgcgacttacatcgaagcgcctcggcgggcgtacatctgcgccagctcctttccaatcccatctgcgcgcgcgaggggcaggtgatcagctgaagaactttgtctcggggagcctgtgccagctcgcggtgttgccgcgtcgctgagctcgagctcgcgcctcctgggcggaagggaggcagggctcgcacctcctgggcagaaggggagggagggctcgcacctgatgcgccgaggatgagcacacgctcgtcgctcggccgaatcttgtcggcacgtgtcactcgccccttcttattgccgaggtagctgaggtagaggagaagtgccgttggagagacgagcaggacgctgaggatcaggcccgagcccatattggggagcagtcgggtgagcaggcccatcggacgagtcgaggagggctgcgcagccgtttgaggagaagagaatgccgagataaccttggggagaagggctggcagctgggtgagagcaaggggtaagtaagtgatggtgtcggaggggaaggagctcgactgctgctgacgcgtctcgacccgtctcaatggcgcagcggcccgacggtctcccggtcgacgcttctcttccagcagcactacacgcaggcagagttgcagcgacagaaccgcttcaagctggttctgcaagggctgttgcagcacgatgatggagctgccatgccgagggcggctgctgctcctcggccgccgacgcaccatcctcttgcttggttctcgcgaagtgagaccgacctcgttgcctcgccggccaggccgcttctggtcgacgctctttttacctttgaccagcacctcctcatcctcccgtcgtcgtcgatccgcgtctgcgctacctctgcgtcctgcctcttacatcaacagagagggacgcccagcccgaccctcgcccctttcgcgcctcttcggacccgccggctccaaccgtcgatcgctcaaccgagccgctttcggcgtctgcgtcttgatagcagccaacggccccctctcgaccggccacctcctcctactctctgaccagcttccatcgcagccagcccgcgacgacaaagaacgtcgaccgtatctgcgcccggccaagctcgcctcctcctcgacgaacccgcctccgccgagccagatcagccttcagctcctccaggctcgccagccctcccacctcccatcgctagcttccgtcctgggccatgtcgtcgacgggccgctcgtcgaacaacggcgccggcggcaccttcaggccctcgtaccgcgaatcgacgcggaacgcgccgccgccggctgcggtcgttggcgcccacacccagcacttcgctccgccagcgcaggtcaacacgcctatccctcgcaaagcctcggtcgcgtcgtcatatcgatcgacctcgacggtcgcttcggccatctcgccgctagctgccgctggtggtccgccgggcaggtcaggctcggccggctggcaagctggcgtccggaggatgagcgccgatgcaggctacgtctcgtcaagaagcgccgacgcgctcctctcggacgtcaagccgctgacggtcgacctcgtcacgctcggcctgctgaacgaggtgctcgacgagctcctgctctcgctcatctaccgcgcaggggggcttgcgccggccaagctcaagaacgctctgccagccattctgccgaacccgctttcccgggcggccgtcgaggaggctgagctcgagctgctcagctggcttgactcacctgagggtcgtctgtggcggtccgtcgtcgagctcccgctcggcaggggtcgggactggagggatgcgaatgggcgtgaaggcgccggacgggatgccggccgcctgatgcgcgtcatgacgcagacttactcggtcagtctggcagttgtcactcatcggttctggtacctgtcttgacaatcagctctctctggctggtacagacgctcggcgaccgcgcgccgaacgacgagaccgaacttgcgttcgtgcaagccttccgtgcgaagggcggcgacatccgaccaggcatcctcgactcgtctgccctctacctgacggccgtcatcgagtgcgtcctgccggcgctattggctctcattgcgtgccgctgctaacgcgcgcgaaacctggcaggtacaccgccgagtacattctcgccgcgctcggtcgcgtcatgggccacgccgggcagcgcttgagcgcagcgggcgtccaggaattttgggacgccttgtcagaagacgaggcgctctacgagatgcttcagaagatgaaaagtgagtggtctgcctgcggttcgactcggccttctgtctctgggctttgcagcctgacgactgtctgtttcggttcacgcttgcagtccgcgagaccatccagggcacgctcgaacgccagcaagcacgggacgctcgccgtcaggccaaggctctctcgcaggcctcgagtgcgaccgctgcctcatccctggccagcggcggcgcagcgacgacgctaggccgagccaactcggtcgcttcatcgcccgctccaagtcaagcgtcaacctcttcaggcgcgaggcacaagcactcgctctcggccgcgccaggtctaggcgcctccagcatgggcgagtttgggtcgtcagctggccctccgcctccggctccttcagccggcacgaacggtctcggaatccgcagcgctcgagggtcggtcgtcgatgcgacgaacccagcagttgtcggcggacggaacggcagcctatcttcgcaccgcgacagtcatgacgggcaagtgcctgatggcgaacccagctcggcccgcggctcgctcggcgccatctctgagcagcgtactggagcaaacagtcgctcgccctcactcagcggtcaaacgacagcgcacgcgcgcatccctgcggccaacggtggcaatgcgagccaacgcctgccggcccagagcgccatgtcgcagtccgtctttgccggtcgggacggccgcaagtcgacctcgtccggccgactgtcaaaatcgggtctggcaggagacgtcgaggcccagcagtttgagcgggagggtccggacgagtttgaggcggcgctcaagggcggagggaccaagaaaatgagcctcacgcccgtcgtcatgaagcggaccgaggtgcgtgctgccgctcgtgcgctctgggagagcgaccgctgacgccagctttctacccctgtttcaccttcgcccccctttcatcgccgcctccctttcatcaaacgccgctgcgcccttcactcgctcgctcggcccgtcccttctcccgcctactccacccgtccccggccttttgccgcaccgcctttccttctccgcgggtctgctgccttctctctcgacgtcgacctccttgccttcttcgtccgccatgccctcctctgcccgccatcgcggctcggtcatcatgatcccatcggcgccccgtcgatcgcgctcgttcgaaccgatccgcatcgccggcaccgacctcctgcctgacatcacgctgtcgccgacctcggccttccacctcgacttcctctcgtccgacgcgcctgccttcgctccggcctcgaaccggcaccctttttcaacgatcctccgccggccggctccgccttatcagtcatccggcagcgagagctccagcccacggataccgcagtcccgccagggctcggttcagccgcagagctcagagatgtcgaggacggcctcctcggcgtccgacaagtcgtctcgaggcggacgctcgaccggcccagccaagcgcttcgcctttgcctcggccgccgacgtctcgcccgacctcgctcagccctggcagcggccggtctcaaacggcagcgtcgggccgaacctcagcgtcaacggtcggccgctcacgagggacgccgggcagctgatcgaggaggacaaggaggaggacgagagcgaggtcgacgagtttaccccgcgcaagcccaaggccgtgcacaaggaaagcctggccgagctcgtgcgtcttctctttcgtcgcccgtcgaccgccggctgactgacgccttccgacccttccagctgagctctccgcctccatggcaggcgacaactgccgcggcaaggaaggaggccgaccgcatcgctacgccgcctgctcagacccaaagcgccggcccttcgccgaagaacacgccgccgatgccgtcgtcgtcagccttctcgaccagcgctgccacgccaaagcccgtcgcacggtcgcctaagattggcgccgacgccgacgacgaggtcaacctcgatagcgacgacgaggagccctctgccggcaagaagcgtcgggcctcgcctgctgctgagctcacggcctttctcaacgacacgccgccgccggcaaaggactcggccgcttcgtcctccccgcgcaacaactcgccaacgccctacttccggtcgagcccgtcgatcgccagcaagctctcggtgactgagccctcaattgtccgaccgacctctgccgcaccaccggcgcccaccgccaagccaaagaagggccttaagggtctcatgtcaaaggtcctcggcagcggtcacaccagccagccggccccgccggtccgcaactttgaccgcagccgcatctcgcagccgacagcggccgcgccaggagtcgccgagacgatgcgcgcacgcacggccgcgctcgacacgcgggccaacgtcctcgaccagccgacaaaggatctgctcgatcgctcggccagcgtcggctttccctcggccacaagccctgtgccgtcggcgaacctccagccgccaaccctggagaccgacagcagccatgtccgctcgcgcccgacaagcgctctgtcggtcagcagctaccggtccgacggcgagtctcagcggccgcgcaacgacggcccacctcgctcgcgcgcggtctcgcagatctctcagacctcgatcggcgccggctcgatttcgtccggccggccaatgtcggccactattccgtggggcgctggcaacgaggctgccccgcaagaccgcctcaaagcgcccgtccggagcatgtcgatctcgcgcaagcccgtctcgcccgagctgcgcaacgcagtcgacctgccgatggtctcgcccatgtcgtcgccctctggtgctgtcacgcccttgccgatcatcgactcgccgcctcattcgccggtctttgaggcctcccgggccgacgacactgccacgccatcgccttctcgtatccagaaatcgatcgcgagcgctgccgcccacaccgcgatggctcctcccatcctggccttcggtgccccggcctggacgacgaccggcgacgagaacggcgagcagtgcttcccggtcgaggtcgacccgctcaccacggtctcaaccttgaaggatgaggagccaggcattgtccaggcgccgtctgagtcggcagcgacgcccgagatcctttccgtgccttataccccggccgcgcctgccgatgttggaagcccctcgtccgccgctagcccgccttcggtgccgctgagcgagctcgtccatctccggtcgctcctcgccaacgcgacaaccgccgacgagtgccgcttactcgtcaacgcgctcctctcgttgtggaaggtaccgtcggccggactttcatcgaccgcgaccgactcgtcagcggccgacacgagcgcaatggaagcccaggtcgcgcgcgtcttttcgtggctcctgtccgaaaccggtatgctcgctgtcagctcggctcaaacgcccgctacctcggccaaggatgccttgccggcatcgtctgccgtacctgccgcgccagggacgccctttgtcatcccgccgacccccgtcgagccggctgcgggccgctttgcgcccgacgcgtcgctgccggagacgatcgacgaggctgcgtcaatccactcgtcggcagaggaggaggtcgaggaggccgagtacgaggcccgcgtcattgccggccgggctgccctcatgcaggccgtccagcaggcctaatcggccgcccgtcacggcacccaagggggtgcgctaatcttcgcaatcaatgtcgtttcgacaggtagaacgcgcgaaggcgaggcatgcgcaaacgacggcacagacaggatcctttagtctgcctcctgcaaatgaagggggaaggtgcgcaagtggagtgagccgccggcaggtacgtatgcgcaggacagccgctgtcccggcgtcgctcggcgcgcaccccgccccgctctcgacgatcaccctcgttcgagctcgccttccctacttcgcctcagtttcttcgcaatcttcgcaacagcaaggtaagcagcgcgtctcgagcggtctctaacctccttctgtcgccgccgctgaccctgctacttcgaccgacctggcagcagcagctcgcccgttctgcatctcgaggacgcgcagcagcagcagcccggctcgccgaccagtctgccgcctcgagctctgctatctgccttggaccaaccgtcaagcaagggaggtgagtcggcttttcatacgctgtcggctgtgagacatctcgcgactgtgtggtgaagtggccgcgcgagcagcgggcagcgggaggtcatcaaggcctccctttcaaactcgcccacgaaacgactcctctggccgggtcggctcgcaggctcgcacctcgccaacctcttgtaccaacaccgccacaccaaagattcacagggctaggacaagctgacaagcggctcccaatctgcagcccttttccccgaatctctctcgcggtctcgtcctcggtcaccctcagcacgcgcgcgctcgggctttcctccccgttgcatccgtctctcgacttatctttcagccgaaggtcctgttgctctcgctcaacttttcccgacgccagcagcccaatttctctcaccgaaaccccttacagccaagatgcacgacgccagcagcaccaattctctcgttggcacgcctgcagtgatgtcagctgcccagcgtctcgcacaacagccgcccttcaacgcgccagagaacgacatcgtcctcctctcggctgacggcgttcgactcggcttccggcgcgtcttcctcgagactgcctcagacgtctttgaaagcaccagcctgattgcggccgagagcggcgctcaggcaatggaggttgatcaagaggtgccggttatcccgctcgccaaaaatgcggccgacctagcgaccttcctacgcttcctcgacccgcgcgagctcaaccccgtccttaagaggtttcaagagctagagaggtgcgtctttcttcacgcagtgtttccgcaagacgtgagctgactgctcgtacccacccttccaggctttgcttcattgccgacaagtatgccgtcgtctcggtcgcccgggcggcgcttgacgcagacggttgctactttctttccgacttttcgcccgagattctcgcgctcgggctcttcttccgcatgccagctctggtgactacgacgctccgcgcgagcgactttgcgtgcgaagagggcaagccgccgtgcgtcatcgacgacatcccgtggcggctgctccggctcctgccgccgtcaacctttgtccggctcgcggtagaacactctcggcgatactgccaagaatggtcgtcgatgtgccataatatccaaagcgtaagttcaggtgctgctcctagagagacgtgtgcggtccaactgacgacttgatggttgcgacagaagcgcaactggttcgatcaaggcgacgacggcctcgaaaaagcgctcgaagctcaccgcaacgagactgtccggtgtcggaaggccgaagaggagcgccagaagagagaggcgtcgatctcagtcctcagccagtctgtgacagcttcatctcgacaagactgacccgacgacggcgttacagggagaagcgttcggcactgagcaccatgccatccagcaacagcgcagcgaccgtccctgatgtcgaggaggtgaaatcgtcatcactctctccgtcgtcatcgcccgtagcgcttgcgaccgtcttctctgaccgctcgagcgacatttaccttcgggcgggcagcaccgactttcgtgccagcagggtcatgctgggcctgcacttgagcaatcttcgcgagatgctctcctgggccgcggacgccggcaatgtcgcaagcgcgcgcgcgacggctgcttgatcgtcgagctcaaagagacggccgcggtcgttggccggatccgggcttttgtccatccgcaggcgaccaagccggcgatcgcgacgtacgaggacctcgaagagtgcgccctgcactctctgcgcagcggtggagttgggaacgctgatacttgctacccttttctcaggctctgcctcgttgccgacgagcttgggctcccagtcgtcgctatcgacgcgctccactcatgtggcgccctctttgtcctctctcatgcgcccgagctgctcgctctcgccctcacattcaacgttcggccgctggccaccctcgccgccaccgcgttcgaccaccgagaggacaggacctccttgtatggctacaggactcacctaccgctctagggcccattcgacattccctggcggctcatccggcgggtgccgtttgtcgtttttgtccggctcctccgctgccatacgtcgattctccgctacgacggtccctacagccgttgggccggggttgcgcgcgagatggaacgggtgcgtgctacctcttgcgatgccgacggacagctctgactgacgctgtgctttcccatcgcatcctctcttgtaggacgccaaatgggtctctggcgcggcagctttagtcgaggcgtctgacgctaaaagcttcctcatgcgctgagcgcccaggtgcgccctcggccatccagacccaaactcgctcgactcgtttactgacaatgctcttccgttacagtgcgcctcggcccgttgccctctctttcaccttcaggctcgacaactctttgatacgctctggagacccctttcgcctcttacaccttgacgacacctcatgaccgccctttactcctcctccttctcagtccaagtctgagccctgcactgcagcggataacctaacaggagggcgccgcgtgcccgggcagttgagcgcgagctcctttcagattgcaactgcaggccggcggcgagagggcgctgctccgctagaaacgagtcgagattggcggggcgtgaggcgtcatgacagagagcacgaaggcaataggttgctttgacagagaggacagcggcgggtgctaaccgggtgtgaaggagtgctgacgagggcaggaggaagtgcgggaaggttggcgacggccggcgagcgcagccgaagcgcggtcgtaagacagccgcgacggcccctggtgaccgccgaaagagagtcgcgtgctgagagatcaatttctcacgccgtcgaagccctactttggccgagaggctggtcgtcggcctcgccgtcgtcgtcatctgcgggctcgttgaccttgagcgacttgacaaactcgcggtagtcgaacgtccctctccggtggtcggcaaagcgggacgagaggagggcgtccatctgcaaggcaggcggacattcagcactagtggtggcggctatgcagcggttgcggactcgacagcgcacctcgtcgtccgacagcttgtcgcccgtcgtctgaagccactcgcgaagctcgtcgatccgaacgacgccctcgtcgctcgcgtcaaagctcgcaaacgcctcgccgacgacgtcgtccttgtccatccggagaagtttgtcgcccatcatcgtcaggaactgagtaaagctcagctgctgctgctgttgctgggcggcgccggcggtcgaaggcgggagatagctcgcgaggtcggccgagctcgcgggtaggccgaagttggcgagcgtcgacgagaggtcggcaagtgagatgaggccgtcgcggtcgacgtcgatcaagttgaaggcctcgcggaactgcttgatctgcgacggcgagaagagcgtgtagaggggcgtcgacggctggcgaggatggctgcgcgcgccgaggtggaggcggcgacaagcggagaggaggtcagccggctggtcggtctgggcaacatcgacggacagcctgaagcgccaaaggagacgtccatctgtgaagtgtagggcaggctccgctcgctgccctatggcgagagagctggacgcaagaccattccaacggaggccgacgacgacgcacctcgctttggcgccttgtggccgacccaagccgagcgactgccacaaggaaagccaagccgtcagccaatacactctagtgacccaattacaactagcgacgtaccgaggacatctcggatgagcttgagagagggctaagggagggcgaggtgatcgttgaaggacagacaggcagcggctggacgcgctctctccgcctgcccgccccgagcatccgacgaccatctcgtgccttccctcgtccgcctattcgcacctgaaattgcacatagaccgctctctaacgctacagcagaggtccgtcctgccttcctctacacgctcgaggtcaatcgaggtccgattcctgactaacccgacctgcctgcctcccgctgcgcgaactcctctcgcaggtcgccgtcgcctccgtttcgcccacgctggttgcttcgacgtcttcccttcaccctcccgacgacaacaacagcgtcgagctctcgcctcttcgcccgatcgcaccgctccctgctcccagcgccgccagccgcagcccagcagccagcatgcccgccctctcgtccttcctcccgcgcttctaccgccacccttccgccggccagatgccgcacgagcaccacccgttcaccgtccgcgacgtcctcgcctcgtacggcgccgactgggcgctcgccgtctttctctggttcttcctcagctggttcaaccgggtcgagggctacaagcgcgagttctcgctcgagcatgacatcaggtgcggccgccgctcgccgacctgcctgggccgtctcgcctcggtttacaagcgatgctgcctcgagcgtcgaccagatgtgcttacttcgtgctgccatgccttccttctcttgcgcaccctcgcgcgctccgtcttctcagcatccagcacacgtttgccgtccagtaggtccagtcgtcgaccctcgtccctcgtttgtgccgcccgctcgagccatcgttgacccgctcttacaccgcccgttttcgacccacagggagcgtgtgcccgtgagtctctctcatccttgtttcccatcagcctgcctgcctgcctgctgacccgctctccttcttcctggcagccctggcttctgctcgtcatctcgttcgtcgtcccgctcgtctcggtcctgctcgtctcggcgctcgtcatgcgcaacgcctgggacgtccacaactcggttctgagcgttctcatgagctacacgatggccggcctcgtcacccaggtgatcaaggtgcggccctttccacctctttttactgttgtctgcccgtctctggggctggcggctggtcggctgaagcgcggctgtcgagcgagcggaagcgcagcgacgcacgttctgcgagggctgaagcgcgactgtcccgaccgccctttccgtcgcagatcaccgtcggccgtccgcgcccggacttgattgaccgtgagtgtctcccctccgtcgcaaggccccgccttctcaagcgcgcagtgctgacgtgcctccctttaaactcaggctgcatgcccgcgccgggctcgcacgaccacatccccggcctagccaacgtctcggtttgcacccagaccgacatgttcaagctcaacgacggcttcaagtcgttcccgtctggacacagtgcggcctctcctcctctcgcgttgagcatcgagagtctcgcgtgctgactatccgctcccgccgcaggctcgctctcgtttgccggcctgacgatcctcgccctttatctcgccggcaagctccacctcttctcgacccgcggccacaagtcgcgtgcatggcttgcgtgtgcgcccatgctcggcgccgtcctcgtcgccgtctcgcggacgatggacaaccggcaccactggcaggatgtccttgttggctcgttcctcggcatcgtcgtcgccttcgtcacctaccgcggctactacccgcccctgagccacgcccacgcccacctgccgtatgcgccgcgtgaggtgattgagggcgagctcgggagcgacggcaacgacggaggcgtcgaccggcatggctacgagcgcgtccacaccggcggcgagagcgtcgtcccccggccgagctcggaggactgaggcgggagctacccgcgtgccagagggccgtgtggctggccacacgtcagctgcgacccggctgctcagaacggaagtcggtcagagaggggagggatgataaggggagggagacgggcgtcgggccccctcctcacgtagatgcgcaagaatgcccctgccgcctttcacatcgcgccgggatcgagtcggatcgcctcattctaaagccagctgctgctgctgctgctgctgcggtgggagcgcgtccggccgagcggccgcagcctgcgaccgctctgttcgacgctcaacgccagcctgtgctgccgtcgccttgtcgatcgcttgcctcctccttctccgctcctcctcttcagcctgctcggcctcgcgctgcatcgcctgcagcctctcgcgccgccgctccttcatctctctcgggtcgccgataaacgcccggtcctcgagatcctgcctgagcgcctggacggcgagcgcgtgtgtccggtcgggccctgacggtgcaaagtcgacgaaggaagggacgaggttgaaggccatcgaggcgagcatctggcgggagtgagatccggaggccggtgtgcacggagaaagggtaagacagtcaggcggcgttgtaccagatgacgtagaagtatacggccgaaacgtaggagccggcctggtcgcgcggaagataaagagggagaagtgggcgacgcaagagagcagggaccagtcaggacccgactcccctcggtgatagagtccccagacccctccttcggcccgcagcacaagcgcgccacgaccaagcgaagccatggctcgcaaaagcagggggaagtagcccgcaagggagagagggacgcaccgcaaagacgatgacgcgcgtgaccttgcccttgtcgtgcccgccctcgaccagccaaggcatccacttcctcaaccacggcaggcccgccgtcgggccccacgcctcgcgctccttcgtcgtccactcggcccgggggtcatgcgaccaacggccttgccgccggccgaggtcggaccagtacatgtcgtgcgcggtttgctcccagccggtccggccggcagaggtcgtccggcgcggcgggtagcggccaccgccgggagggaagccgttgcggtacgacgggtgatactgctgcatcgtcgagtagtgccagccggtctgggagcgaaggcgaggcgagggacgcgcagagcagtcgggcggcgaggtcagcaccgatggtccatcgttcggccaagttcagcgtcacaacgcacctgattcctgtaagagcgagcgagcgagtgggttgagagataggtcttgtcagctgtagcttgtagctgacactcactcgctctgttctgccagcagtagccggcgcggcggagtcacaagggacgcacatcaagtactggctcctgctgccctccttgcctagacactcatatgccgtctgcaagtagtgaaatcgctccttggccggcagcggatggctcgagctgttggcctccttcgaatccggatggtgcgtcttgacaagcttgtaataggccgccttgacgtctctgcagctcgcgccgacgggcaggtggagcacctcccaggctgtcgggtgcttgtgccgcgggaaggcgaggtcgtcgggaaggtcgtcaccgagtggggcgctagaggagggggagctgccgctagcgtctgcggagggagatgctcgtgcggaccgacgggcggacgaggggagcggttgaggcgttggtacggtccgatatgaggcggctcggcgctgaagcttgctgctgccggtgcagctgctactgctggcggcattgccggcgaaagtcgagcactgtcggccgccgacagcagctgatagtcgagagagccggccaggaggcgatggttcatgcctgccagtcgtcgtcgagcacgaggacgacgagcgcccgatcgaccctcgaccaccgatgacggcagccagtcggacactcgtcgttgctgctgctgctgctgctgctcggagcggaagaagaggcgctgttgtcgagggcatcccgggtgttatgcagaataggagatgtagaccaatgcgataaagcgagcagacggagaagggagctcgatgcgacggggatcggaggggggggggtataagagacaggggcgtgtgagggaggggaggccgggaccgagggagcttgagcgctggcgaaggaggaggcgagggaggaatgagctggaggagcaagagcgacaggagggctggcaagctgaccttttgtaggtgtcagctcccgggcgagccctgcttcactgtgctgagctcaaagacggtcgaccgccatgcccgacggcctcggcctggcttgatagtcgtaccgaccggtcgccgtgtcgtctgaggtgaaggaagaaagagggacgacgcggggagacgggcgaggcgttgcgtcggccctgtttgttcctctggacagcatcggcaatggttagcaacgcgacccggcagggcccatcagcagcggcgcggcctgcgctgcagccagcagccaggggagcgggccagcggcgagcgaagtcgaggggggtcgaggtcgttgtcggacgcgagactgtcttaccgagccagcgtggcgtttcgcgtgggtcgtgcccggccggcgcggacgaggcccgtcgtcgtcggtcgaccgccagcatcgaccggccagccaacaggcagcactcgagcagataggtctcgcaggcgagccgtccccgcagagagacactatcgccggccgagggaagctgacaccgcacaaccgatcgtgacagcgtcgtgcgggcgtcggcggtcgtcctgccacccctcggtcgcccgtggtcgagcctcgatcgacctgcagcgcgcctcacgcagctgctgacaagctgacctcagcggcagaggaggcgggagggtgtgcgctgccgtacgccgtctctgaccggcaccaggtcgacccagagcccagcaggcggacggacacgagcgacgggacgggcgggctggcgagtgcgagagtgacgagcgagatgcacgactctcgcccgtggcgtctcgcccgtgccgttcggccgcaggcgctcgacccgcccctcctcggcaatgaagtgcggctcaggtcatggtgaggtcgactagtctctgtgcctcgacgcaattgataggggggggcttgccgactgactgacgcttgcagagccttctgacgctgaacggctgacctccgactttcgacctcaaaagggggatccagtggacaagcagcaaagagcagcatctcctggcggcaacatatctgacgtctgaatcagtatggtgtcgagggcagacttctgacccaagggtgctggcgtgccacgcgcatctctcccggcttctaattgccggcccatgccctcaacgcaaagagcaaaccgcacgtcgacgacggaaagaactttgacttcgaatttgcatgttgcatctatgcgtgttgttcgaaagactctctctaggcgcgagctcgacaggtagtcagtcggttgaggagggtagcgggtctgtgtggcgcggaacgccagcggtaagcccaagaggtcctcccgccgacagcggaagagagcggcctcacacctgcgtcagtaggctccggactgatcggctgtcagtctggaaaggagtgtgcggcagaacgcacaaagagcgagaggagagttacaagtctcgctgtctcggtcacgccgcagtcacacgggcctgcctgccgccgccaggccgagcggccgcaagctgcttgcagtgcccgacggccatctcgagcctccattgattctccttccatgctcgttaaagcagaggacaccgctcacgagacgcttgacgatcctgtgctacgcagcagcgagggccgacgggtcactcacgcccatgaccgtcgatcgaccccttcgagctaacaatagacgtgccgtcttttcgagttcagagctgttgtcgagagcagcttgcacggcatcccttcgacgctcccctcaccccttccgagcacagctcacagcagatccgcaagcacaccccgacgtcctcgcccgccaccaagagtccgcgccgctcgcttttttcctacttcctcctcccagtcctctcgccagccagcccgtcgcctctcacgcgtcgccccgttagcacgcacgcctccttccgacttcgccccagcaggtcgagcaggtcacctctagcctcgctcgtcacagccccctcttcctgcggcctagcagcggcgcctccctcctttctctcccagactccatctcgccggccaacaaagccagcacccagcccatgcggtcctcatcagcggccgacgcgcagcccctgtaccgcaatccggccagcagccgctactcgatggtcaatagcgacacagggtccgacgccatgtcgttctcgccgaggaacagccggcaaaacagctcgcacgacctctacgccgatggcggcctggtgcgtcccgactgccagctttcggcgagggagggggttggagcgactcgcgaagatccagtggctgacgcgaaccctgccgtaccctggtcgatcagcccatgtcgtccagcgccttctcgagcgcttcaaatctcggccctggctcctgggggccggaggacgacgactggctgcacaacccagacaagtcagacggggtcaaggtgcgtatcgtccctcagtcagtcgagctacagccgtgctaacctcgtctgcccgggcccgatagcacaacttcttctcgatccgcggcatctggaattacctgactctcggcgtccttctcggcgccatcatcatgctcttgtgcgtttgacctgcccgccgagacaggagtttgagcgctgactatcaaaacccccttggtccctcttttcagcggcggttacccgatcctcagctactttaagagccatcagccacagacgctcggcgccttcaacctcggaggaaccaacgcgagcgggcaggtccctacgatgatcggcagtgcgtgcccgtcgactgcgactctttgccgaggctcggaaactgacgactgttcgtctggctgcccgcagactttggtctcattgacgcggacacgccgacgtcggcatactctatgaggaccgagtctggcgaggactgggaactcgttttctcagatgagttcaaccagcccggcaggacgttttggccgggaggtgcgtcatcgcgccgtgcttcaagttcacgacctcaactgatctctgtctcgcacgatgactcctctagacgacccatactgggagggtgagtctgccgtctcgtctgtgttccagcttctgccgactttgagctgatcccgacttttcgcttctcgtcgcccctcagcccaagacctcgttcgtcgccctgatcccttcgtcccagccaggcttccagctctgacctctcttttacctcttcctctctccagcatgcctggagtaccaacgacctcgaatactactcgcctttggccgtcacgaccatccaggacccagatgacgagaccaacggcttctgccgcttcaccctttccaacatcacgacgcacgacctctactttgagggcggggagatctcgacgtggaataaattttgcttcacgggcggccgtctcgaggcctcggtccggcttccaggtcgcccagacgtctgtgtgtagtgtgcttcgctccctctgagcctcagtcgagccaatcgctgaccgcgacccctcgcagacggactctggcctgccgtctggacaatgggcaaccttggtcgggtcggctacggtggtacgctcgaaggtacctggtgcgtacgccgcgagcgtgaggaaggcttgtgagctggccgaacttaaccccgacccacctcgccccaggccctacacgtacgacagctgcgacagcggcacgctcgccaatcagacaaagcccgacggcacgcccgagattgtcgaaacgggcaacatctggggcgagccgctgtcgtacctccagggccagcgcttatcggcctgcacgtgcccggacgatgatacgcacccggggcccaagaaggccgacgggacatggaccggccgctcggcgcctgaggtaggtcgacgagctcggagagacttgacgctcgtcaaaagggttgccgagctgaccttaactcgccccgcagatcgacctcgtcgaggctcaggtcgaccacgagacgcttctcggccaggtctcgcagagttgccagtttgcgcccttcaatcttcgttacgagtgggacaaccagaccaacaaggtcagtcctcgaggcctctaatgtgtgcgcttgcagaactaaccctcttttggtcgctggctttggcttcgcaggatatctacgaccaaagcctcacgagtctcaacacgtacagtggcggccagttccagatgagcgcctcgggtctgacgacgacgtgcgtctatcgcgactatcgagatcgatcagcggcttcggctgacgcaaccttgactgtttccttctacagcaatcagaactgctacgagctggcggtgggcggcgccgagcacaccggctgcttcgctgtcttcgcgtttgaatatcagcccggcatggacggtgcgtcgtcaatctgccgtctctcttttgtcattctttcgctgaattcgagctgctggcgatctttatcccctcccttaggctacatcacgtgtgtgcagctcgccctctccttctgtgtccagcgcctgacccttccgcctgcgtcgaacagctggttctcgaacgacaagccctcatggacataccgtggccagggcatgcacgcacagtcggtcatcgacgtcggcgaccgtccgatcccgggcgagcccctgtgcgaccttccccccctttcttggagtcttgattgcaacttgctaacacctgctgtggcccgcccacagttacatcattatgaacctcgccatctcgctctctttcacgacgatcgactacgagaacctcctgcgtgagtcgccgctgcctcgggcatcatgtgcttggacgacgatgaggctgaccgctctcactgctctcttccagcactcatgcccgttcacatggatgttgactacgtccgcgtctaccaagacagcgacaagaaggtgcgtctgccatccgagttgtccgaagcctctctcactcgtctaaccgctcgcccccctcgccgcctcccccccttacaaaagaatatcggatgcgacccggtcgactatccgacggccgagtacatcgctcgctacgcagagggatacagcaactacaacatcaccgtgagcagagtctcgctcctccactcgcctgccgtcgatcatgtcgctgaccggcgtcccttgccgtcccttatcagacttgggagtgcgtacctccgcccggccctgctgtgtcggaccgatcctgaccttgcgcttctgatctcgccgcagccaaatgaccgacaatgcccccaagccgaagaacaggctgctcgacaccgtgcgtacttgacgtcttcttgatgtcggcggccgtcgaccgaactgacactcggcccagccctcccagtgctgagcgcagctacgagtgcctgcgccctccctcctcttcccttcttgcgctcctgcttctcgcttccgctccgccccttgcttcgaccctccaacttagaccatacccggcggcaggtcgactgccaacacccgcacgctaccccccccttccctccttcggcccctttatcctcgagcccgcgctgcctccatcctagaccctttgcttcctgcttctgtatcgctctgctctcaactcactctcacctcacactcgcccacatctgcatgcacgtttcttttcgccaggggctaaattgccgagcggcgcaacgcaacgcatggcggccgaggtctccagccgggctgcgggggacgatccggggcgggccgggagaccttactttggagccggaggccgtcgctgcaagagcttccttcgactggctggccaggtcgacaagctccctgataggcacccctttccgagtgctttgagcgtttcctccagtcgcatatgtaagtcccagctctgctctggcttgaccaacggctgcagaagagtccgcccggctggccggctccgatgcttggtcccgcttgctcgctggcgccagccggccttcttctccgttccctctccagtcctcgctgacaacccgacctccatcgtttgaaacctcgatggattctgcagggcctcccgcccggccttccggtcgctggagagcgacctctcgctgcaacccgtcaagtcgaagaccgggagcgagaccggcctcagcttgcgggccgatctgacctcgagctccgtcctcgaagagctgcctggcggccgccgtgcgggcctcttgtcggcgaccgtcgagcagggcagctcgagaaggtacggcgcctcctactttcgccgctcggcctatggcgaacgctcgccctggcggcgaccgcgcgtcctcgccccgctcgtcgtcatgctcctggccgtcatcgcgctagcggtcgccctcccggttgccctccatcggcacgagctctcggccgacacctcatcttccagctccacggccggccagcgtcagtcggcctcgacagcctcggcagcagctccttctggctcctctgtgcctgtcgccgcgcccctgacgtcggcgcaggagttctcgcacattaaggcgcgccgccgcgtcgcgttcgctcaaggcatcgatgcctggcgagtcgctgccgttccgtcctggctcgcaacgcagaagcccgacggaagctggccagacatcgactacacgtcgggctgcgctgcacagcgggcaaactggccggcacaggagcacctcactcggacgctcgccctcgccgctatggcttccggcctcggcatgaacgcgacagcgctgacgaccacgcgtgcagtcggctcagcggcatcgagtgcgcttgactggtggttcgcggccgactttggtggcaacctcgactgcctcgcgcagggcggcaacccgtgcgtctccagcttgcgcgagccagattggccgtcccagttgaccagcctccctctgtcaggtctcgcgcttgcccgtgcggcacgagagggctttggaaccgcaactggttctccaacacgatacgcgggccgcggctcatctcatccgtctgcctcctgctccacgacgacctgtcaccggcgcagcaggagtcatgcgacgggatcgtccggcgcacgtacgacttcgagaaggagattgtgccgacctaccgctcgcagacgggcgccaatctcatcaacgtgcgtctgcccgagccgccctcctcactgcttccttactgaagccacatccgccatctgatcgcctcagatcctgcaaaactttgtttctcttgcgctgtacacctctgacgacggcctgctccaggaggctctcgggcgagcgatgggcgtcgtcaccttctcggacggcgtcgcacaagatggcatccatcgcgacgggtcgtacctccagcacgacggcattctctgtgcgtccgcctagcgcccgcataaggcctgttacccttcgagtgcgactgctgacctgatagtcgcccaccagactctggcaactacggaaaggacctcctgctggccttcatcgagcttgagggtcaggcgagcggtacgtcctacgctgccggcgaggatgcgcgcgcggcgtttgcggccgacattcgcggaagcgagtggatgatccacggtgagacctcgacgagcaaggaggtctgggacatcgtgagtgcacgtctcgcctcactcaagttgactttcggctgaccttcctggttgactagcatgctcttggccgcttcgttgccttcccttcgtccgagctcgcggccagcgcagagtcagttccggcggcgctcgtcaccggctttggcaagcagctgacaaggacccctactcctgtgctgcagtatcaacgtcaacgtcacccagctggcagccgcgacggcttccttctctggcgacgacgacctctcggcagcgatcaccagactgtcgtcgaacgggtccatgacgagcgccaacgtcggcgccctgaacgggaaccgggccttcccagcgagcgactacatggtacgacattcccagctggtgctcagtgttttatcagcgctgacgactcgcccccccccccgcctctcaggttcaccgccgagacggctacgttcagtctgtcaagctgctctcgacgcggtcgcgcaacaccgaggccatcaacggcgccaaccctttcggcttccacgtcggtatcggctcgctcttcacgtatgcgtcgggctccgagtacctcgacgtccaggccgcctgggactggaaccttatccccggctcgacgacgctcctgaacctgccgaagctggacaccgatcacgctaacatcaagggcgtcaagccgttcgttggcgtcgtctcggacggagaagacggcatcgctgtcatggactttgcgggcgcggctgaagaggctcagctcgcctaccgcaaggcctacttcttcctcgacgacgtcgtccttgtcacgacgagcaacctccaggtccgggccgatgtgtcatcgacgcctgtcatcgccgtcctcgataaccgtcggctgtctgcggaaggtgtcattgtcggaggcgtggcgcagacgatccctgcggcggacgttcaagcagagtcgtcgactctctggcacgacaacactggctacctcgcctactcgacgcccttccacctcacctactcggccagcgaccgcaccggcaattggtccgagatctcgacgagcgccgccgggctgtcgaccgtctccttgttctcggcctttacgacgctgcctcgcgacaaggccttcacctacgccatcttcccggcctcgcctcaagcgcgagttatggccgaggcgattgatcctaccttcacgccgcttgacctcggtcccgacatcagcgccgtcgtcgggtcgggccgcctggccgtcgtcttttggatcgctggtcggtcggccagagtacccctctcagctctcgactggccggcagacgatgcgaacgacggtggctcgctcgtcctctccacggatcaacccactgtggtcctgctctctttcgacgacgccgccggatcgctctcggtcacgttcgccgacccaacacagaccctgactaacctcgacgtcacccttcgcgtggacggaactggtcgaggactctcgtgcggcgacgagaccgagtgcacggacgccgaaggcgtcatcaagctgcactcgacgctgccgaaagcaggcttcgcaggccactcggtcttcaaatcactcagcttcctttagatgtcccttatcatgtacgtcctgtcgtcggcatcttctttgtcgaagtcgcttaccgtgctcccttgcgtcgggtcaggtctcttcacgaacataacgttgttcttgtcgcactctcgcatgttttccgtcgcactgcttcgttgaaggaacagcccatcgaaaaaggtgtgtaagaaccacgcgcgaaggggcgtgcgaccatgtaggaaggtgcagtgcagagttggagaaggaagctctatgaaacgacgggagggaagcgaggtgagtccaaagagaggttgagttaccgcgctttaggcggcagcgcacttggcggcggcctcagcaatggccgacgccgggcagctggacgagcagtgctccttgggtccgtggcagcttagaaggtaagagagaaagtccgtcagtcgctgcacaagcttgatgagcagacgatggcttagcactcactggcagtcgcaggcctcaacggtggcggtggcagcggcggccgaggcggtggagacggcagcggacgatgcggcgtaggagggcgcagcagtctcctctggcttgggctcgccgatgcagctgcctccaggggcggcgacctcgttggcaaagatgtgcgaagcaaagtactggacgaggcggcaggaggcgtcagtgctggctcgccttgaaccatgtagggtcggtcgtctcacctgcaggctgtgcgtgttgatgacggcctcctcagggttcgtcttggccagctcgaggcagtcctggtacgagtcggcaaagtgggcaacggtgccgttgcccgagaccgaggggacgtgccacagccggtggaggaggtcggtcgaccagtagtacgacggcgacgagccggcaaccgtaaagggagcgttgcaaaactcaacgttgaaccgcctcgtctcataagacagatcgcaaatgacggtctcgctcgtcccgttctcgccgcctgaaaagaggcaatgagtgggaggggtgaggggggatttcagcacgtgcaattggaaagggagaaatccaacgcacgccagtggccgttccacccgtcctggccgcagttgccgtcggggttgtcgcagcggagaaggacgccctgagtgagcgaaggagtaggagagaagggacacagtcagtcggaccatcagaaaggggagaggggtgaagaggttcgctgcgcgacgcaccatcttgttcgagcggagaatgccctcataggcgccgagggcggtcaccatgttacccttgccgaagtagagctggtagactgggtcctcgacaccgttggcgacgatgtctgcgagtgaaggaagcgggtggtcaggtctagagcgggcgccggcaaggaaagcgggcggcaggcaggacacacagttgctggcgatctgagcgacctcataagtgtccttgagggcctgctcaatctgccggtgctgggtcgtgttgcaagactcgtggatctcgacgtcgtcacggtactcggccatctcccgcttggagacgggcgaagcgatggcctgaagggcgagcaccgaggcggcgagggcggcagggaagagcatgctgacaagtggtgaggttgagaagaggagaggcgagggagcttgaggagaaaaaggtaggcgaggtcaagagccgtcgaggcagtttatgtagaacctccgaagcggtgaaaaacggtcgttgccaaggccggccggtgcgtgcatgcgactggcccggtttcctcaaaacagtcacggcccagtccgaccccactctcctctacaagctccgggccgtgtggcgcctccaaaatttcgctcaggttccaccgtgcaagctaggccagtcggcggatcccctcccccctctgggctagtcagcagctgcagccgccagcgccgggccgatggcgtcgtgtcgatgtcgccgatgcacctgtctggaggagcagactttcatcgtcctgccggcagtttttggcaaggcgctctctggacgagcgagcaacgtctgcgcaagaatggcgagctctagatgcacgtagttcgcaaggggcagcgcgaggagcaagaaaggggctcaaacacgccgcgcgggcgaagagaagcgttcagggggcgacgtattcatgcattcgaagcaggctggtaggctgctttgcgaggcagcttttgtacgatgggaaaggtagagaagagacgactgtgcgctctatgagcgctctagatgaggacggcagcgagaccgacgagaccggcgccgacgagcggcatgaagccgttcgaggcggcgacggcaaaggcaccgctgccaggggcagaagtcgcggccggagcggcgcccgttgacgaggcggcggccgagttggcggcagcagcggcgagagacgaagcggaagccatgacggacgcggccgacgaggcggcaacgggggcggctgagctggaggctacagtgcccgaggcggcggcgacgcactgggcgttggcctcagttacgcgcgactcggagcagtcggacgagcagtgcgactcggaaccgtgacagctggataagggagtgaggctgaatcagttacggggcgggtgtcttggtggacagggagccaacacgcactggcagtcgcaggctgtcgagcaagagaggcacagagaaagtcagcgagaaattgagggccacgggccaggagcggcactcactgtccagagcaagcagcgtgctgttactgcagtagtagtcgtagtagctgacgggctggccagtggcagggttgacaacctgctcgccgtcagagctcatgacgacagtcgagccgaccgacagggtcgggatctggcgagacgggcaaccgaatgaagggcgtcagcgatgtgcaattgcgttacggctgaagggtctgagaagcggccgtacgatggcgacgtcttttgaaaggagggccagtgtctggtcagcgtaagcacgggacagcgatcagggcgcagcgccgcgacgcaccggcgcaggacgagacgttggcgccgtcgccgacggcctgaacgtagagggtgccgatcgtgccaggggcgagcgagccagtgttgaggcccgaggtgttgaagcagaagttgcccgactcggggaaggtggcgttggcgaggagggtcgtcgcctggagtcggcgtcagcagaggtcgaccaggaggagcaatggaaacgacacacaaagtcggaggcgctggagaccgagggaccagcacccgcgctgccaacagcccaaaggacggtgactgattaaagggaggcgcgaggtcagcgcgttgcggtgcaagttagagagcagcgaagaggcgaaactgactctgctggccagcgtcgcctgacagactgatgaaggcgtcctgggtgccccaggcggaggctacgagaggagtgcgtgacggcttcagatcagctcgaactcgaacgcgaatcgtgcgtcttgaatgaacggaccgttggtgcgagcggcgccagcgcagaaagcgccggtctcctgcgcagactcctcaaagtcgcgctcgccctagcagagaagggaaagctgtcagcggcgcgctctgatgcaaggcagtgcaggtccggccaacggacgagaggatagttgatctggacgtgcgcgagggcagccgatgcgagcagaagaggagcggcgagagtagcgagcatgtcgaagcgagggaggtaaggaaggagagaagggaaggggtcgttcggtggtggtgggcgttcggaggcgaggtcaggcttcgcatcttttgcgccggccctgtctccttccctctggagctggccgccggtcccgaccggggcatgtggagttggcaagcgccagaacgaggacgacagggtcacagcttggctggccggtctgcgcgcagtcgatcgtcgccgtcggtagtttgccggcgcgcgcgcgtgcaaccttgcgtgaggcaaggaggagctcgggaagaggaggcaagcctgcttttgacctcttgctggctacgatgcgctttatctacctggctctctgacagccacttgctgctgctctctgggcatactggcgggaggcaggcatgctggagctgacaatcgttaaccagggggccaatggacggcctgcgatagagtgcggacaggccttggcggccagtcttccccctcacgcatgcccacctcgctccgacggttgccgaggcctgcggcgcacgactggcctcccagttttgcagacccaacaggccggttgagcgtcctgcctgccgactaaagagtggtcaacgaggatctacagcgtcttttcaaccaactcttccttttgaacgaccgacgcgcgaacgatgctgctcaagaacacgcttctctctgccggcactctgctgctcgccggtgctgctgccaacgcccagtcgtcgaccgccaccggctcgcagtcggctggacccgagagccagggcacctgcacgctcgcggctgtgcgtcctctgtgcatggccggccaccgcagcccgtgctgaccggccgctcctcctccccagaccgacgcctggctctgcagcaacggcgcctactgcacctggaccggagccgccttctcgtgtctcggtggctcgggcgaggtcgttgccgcgacgggacctcctggtcggacgtgcgagtcacatctcggtgcgtcggggaagtgcgttcctgcgaggcctacttgagcctgaccttcgacctcgccccactctgcagaccactttgactgcaccgatgcggccggcgtcaagagcacctgcgagcttgagggcgtaagtctcgtctacttggctcgactacgcagcttccgtcgttgctgaccgctccacgactcccgtttccgcaggacgtctgggtctgcgagtcgttcggcgctggcgagggcgagggaagcggcgcgagcagcgcctcgtcgacctgcgtcgtccatggcggacacacgcacggagattggtgagtgcgcggacatcagctgtacctcgatcgagtgctgaccgactcgtcgcgtcttcagctcgaacgcgtgcgactcgcttgacctcggcgagtggaaccagaacctgcacattgtctcggtattgtgcgtctcgtcgagcggctactctaccttcaccgcagcgtctcgctgataaccacattcttccgtttagcgtgctcctcgtcgccggcctcctcggcgtctatcttccgatcggcttctcgcacatgatccgctcgcccgtctttggctgggccttcttcttggcgaagcactttggcacgggtgagccctctcgttggtcgtccaggtgattgggtgaccgacttcctgactcttctgccccgcgaaaggtgtcatcctctcggtctcgttcattcacctcctctaccacgcctttatcatgttcggcaacgactgcctcggcgagctcgccttcgagccggctgcgcccgccatctcactcgccgcgctcatcatcatcttgtgcgttcgcctcgagcgtgctgttgatgtcagtcctgtctacgctgactccccttgtcgcccgtcgcctgcagcacctttgactttgtcttcatgcggatcatcaacgcccgtgcccgtcggactaccgccggttcgtcgagctcgtccgaggacggcgtctcgccaagcgagcaggagaagcatgtcggccctgcgatgcccgacaaccacactcactcgcaccaccacgcgggcgacgtcgacttctcgtcgccgcaggctcacatggacgtcacgagtgcgtcaagaggctcctaccttgctttgaaaacctgtctctgacacacacctctcctctacagtccttgaggttagccgctacctgcagtcgacccctcttctgcgccgaagcagctttagctgatcaacacccctctatcaacaggccgccctttgcttccactcgatcatgatcggagtgaatacgatctgcagtcgctgccgtcgccgtttctatcgctgacagacactctcctttctcccaggttacgctcggcgtctcgggcggatcgcagtggacccctcttttcattgccgtacgtcgggcagagtccctttgcactgccgacccgtgcgctaacttttttttccttttaaccctccttcgacagatcgtcttccaccagctgttcgagggcctcgcgcttggcacgcgtatcggccagctgcagtttgctgccggcaagggctggcacaagtgggtcatgggtgccatctttggcgtgcgtcagactcctcttcctcagacctcctgcttctctcactgactttgactcgttctccgtgttgcgcaaccagctcatcactccggtcggcattgcgatcggcatgggcgtccacggcagctacaacgccaattcgcccgaggcgcttctctcgatcggcatcctcgactcgatctctgccggtctcctcctctactcgggcatcgtcgagatgtgcgtcccgttgagcgctggtctcttctgttgcacagctgatccctcagtcgctctttcctctcgcaggctcgtccacgacttcatgcacggcgagctcgcaagcgcccggccgtcgcgggtcatcatcgccttcgccgcccttctcgccggcggtctgtgcatgagcgtgcttggagtgtgggcgtaaagaacatcgtacgagaggcttcgatctggacgtaccgtctcaggagcctcgcccagacggccggcgtctgagcgtaggtctcgcgccggtcgaaacgcctcccagtgacatagtcaggatttcgtgaattctttatgctgcatactaggcacatatacagccgctctgcgagcgatctgcgagcgaagaataagcaagaagaagaaggggggggggggatggcagcagagagggtccacgtcatgctcggctccgtgctgctgcgcggtgggccggcatcttcgacccgccatcgcaagtcagctgttcctccgtcccgcgctcctccttctcctaacttcatctcgtcctacaccttcacacgcaatgttcttcctctctacctgccgcctcgcaactgtcactgctcctcgcgttcagctccgggcgctgagcacgacgccggtcgcgcgcaagacgctcaccgacagcgtagtcgacggtgctggtcagcccacatgcagcctttcccgtgctggctcgcagaaagacgccgtgctgaccgtcactactccctgaatcctctcgacagccgagctcgccgacgccgcttcaaagacggcggcttccgccgcccagacggctcgcgcgaccgtcgccgacgccctcggaccggttggtccgtctgcgcagcgatgcctgacgacgctcgagcgcctttcagaagctgatgcctttgctaccctttcctccctgtagagaacgccacggagaaggctgccaacaaggtcgactcggcggcgcgctcggccgagttgaacgcggccgaggcaaagggccaggccaagggctacgttagtacgtcttacgccgacgagcagtggccgcccgcgacgctgacactgacgctgtcttccgactccagacgccaaggcgcccgaagcccagtctgcagtcgaccggatggcaaaggaggcccagcacgccgtcaaggatggcgaggccgccgccaagaatgccctgctcgacggccagaagctcgccaacaatgccgctcgcgagatggagaagaagtgatggaacgttggagcgctgctgtatcaattatcactcgctgtctcgattcaacgggatctgagatgagggcatccatcgtggcgtgcagctccttctaggcgatacagtgtgtgggtcgggaaaaagatgcgaacgaggaagcgtctggaggatacgacgggaaacggcgagaagctcgcttttagacgttgacgccgaccgaggggatggccgagacgatcgccgacgcagcgccagaggcagcagaggccgggctcgagacgacatcgccgacggcggccgagctgccgacggcagcgctagcgacagcggcagtcgactcgacagggggtgcggcggcgatggcagacgaaaccgggctggcgacgccggacgagatggcagacgaggcgacggctgagggagcagccgaagcgagcgaggagacagcggtcgtcgccgcgccagtgaccatgttgaccgagcgggtcgagacgggaatcggggtcggcatgacgagcgacgtcgacgaagccatctcgggcatggtggcgttagccgacgacgagttgctgctgccgaagaaatcctggccgcagatggcctcggcgccggccttgacgattgagagcagcgacagggtgacgttactcgcggcggtcgcgttggaggcctcggtcgaattggcaaagccggtctcgaggcggaggtacatctggcggatgcagtcggtgcagacggcggtcgagagcgtctcgttgttgccaagagacgtcgcgttggcgaggtcggtggcgttggtggccgacgagttgagcgacgggaagaacgacgcgaacgaggtgttgccggtgacgaggccctgaggtaatcgatggcatgcgacggtcagcaaagcgtagagcaaaagcaagcgcgtcgaagaaagacgcacagcgagtagctggacggtgacgttctggccggtgacggcctcaaacgagctcatgagcgaaggcaggcagaaggagaaggacgtctcgttcgaggcggcagcgccgttggacatgctcgacgaggcggccgacgagttggcggccgggaaggcggtcgagttgctcatgccggtcgagttcgacgccgtcgcgttggtcggtgtgcaaatggccgacttgaagatgggctcgttgttgacgagaaaagacagctgaagaaagcaaggacactggttcagcagccgcttcgaaaaggggtcaccggaaaaaaggcgcaagactgaccgtctggttcgtgaggccgatgttctcaaagaggtcaccgcagctctggtcgacgttcccgacggcggtcgcaacggtcgaggtgttgcaggccggggccgggcagtaggcctcgaggtaggtgtcgagaaccggcgtcaacgagaggttcgaggcgccaaagaagagggggaggacgctgccgagcgcctcggtagcgacgcaggtcgacagctctgggtcggcgagcgcgaggtacgacgcctggacgcagttgaggttgagcgggatggccgaggcggccgaggcgagcaggaggccggcaccggcggcggtacgggcggtcgaggaggcgagcatggcggctggctaggaggaggcttgctggtaattgcggtggtggtggtggtgaggagcaagaagagcctgcttgatctcgccactgccttccttttctcctgctctggccgccgtagctgctgcgtcgacgttcgtcatccggtgacggttctggggttgcgtcgaagcgagaggaagggccggccccgcaacggcgcgcggcgcgcgcggcggagacccaggtggagcagtcgtcgcagcgccctgccacagaccgggcgcgacagacagacttcaagccacgaggaaccaggcgcgttaaggaggaagaaggcgggacgagacttcccctcgcacagccaagcggcggcagcggcggcggcgaggattgcgatggagactcgcgtggacgtctcgaccgacctgcctgacatctcggctcgctgccagtgaggccgcgctctggcttgatgaaagcaagggatcataagatcgagagctccgagtggaaaggagacgccgggaacacgggcgcgcaagagaagcgaaaagcgaaagggggcggcgatgatacgacgaaagggttgcgcggtgacagagagtaagaagcaagtggaaggggagaagcgaactcgaagatatgcgggatgtttgttgattgggtagaaggagggattgcgaagtgggaagggaagaagggacgatgcgtgaggcaggaaagatgaaggtgttttgttcggttagtttgctagtggcctggtgagggggacgacaggcggttcagcatcgagtgttcagaggtcagcgaggagaagccaggcaaacgcacgggtccttgggagagcgggagcccgggggttttacagatggacagtcgttgagggtgggtggccagcgaggacgagacgtggaccgagagagagagagcgaagagagtcgagaagagcagcgtcaactagaagccgacgttgaagacgcccgagaagccgtgctgctggggcggcatgggcgggtagccgccgaccgaagcaggggccgcaaacatcggctggccgaacggtccggcgccggcaccgtagtggaggcggtggcccgagcgcgagcggtggtgctgctgctgctggccgtggttgtgagtgcgaggcttccggggcgaggtcgggcccgaggcgccgttgccgccgccgccgccgagcttgacgccaccgccgaggacaccgacctttccgccgtcgtaggccgtcacaggacgcttccggccactcgcgtcgccgaccaccgagggcgagagcgagcgcgaaggcgcggcgagcagcagagcagaagaagacgagatggccgacgagtttgagccgattgagctgacgcgcttgtgccctttggcgccgccgttgagagcggccgagagaagggcgcgaccgtcggcgtggatagccgggtggctgctcgacgtctggctgacagtcgaggcgcccgagaccgaggtaaaggtcgaggacgagacgtccgactctgcgctcggcgagtcgggccgctcggcgaagggcggcaggggaagggcgagcaggttggccgacgtcagcggggctggggtcgagctgccggcggtggcaagccggtgcgggctggccgatcgggtaggtgtcggcggcgtgatggaccggtgcgggaggaggtgcgaaggtggcatcggcgtggccgagtttgagttgggcgtcgccgggatgggcgagcggatggtgacggcatgcgagacccggggcgtcggcacgccagccgaggtcacccagagcgtcgtcgtgacgtctacaggaccagggtgaggtggtcagcggtcatgaagaagcgacgaagacgaacaggagatgagcagagacgcacctttccagccgccgtggaaccaaacgccgtcctcccactcccagccgccgttgcgccactggacccggccggggtcgcaccatgactgccactcgtgctcgccctcgcaggcctcagcgagcgtccgctcccagagcgcgaggtcgaccgacgccttggccgctgcctggcggagcgggcgaggaaggagacccggccggccgatgagcgagcggaaggccgagccgcgcgaggggtcgtcggcgtgccacgacggagcaaagaggagggtgaggatcgaccggagatgggtccggaggagcgtgagctcgacgcgaacgacgacgggctccagcggcgccgtcaggtgggcgagcaggtgcgagagggcagagtggagcgagaggtcgggcgacatcgccggcgggacgctggccgcaggggaggaaaaaaaaggacgggccgaagggtaaaggtgtcggcaggaggaacccgactacgaagaagcacgcgagactcccagtgggagcgagaggacagacgagggtgaggagagaggaagaagtgtgtgaggatcgggacgagggaaggggcaagggggagggaaggcggcgggcggccctgcgctggcttgtcagccgcggcgagtcactcaacaagcgcgttttcatctattccatctaagcctccgcttcccatcgtgcgtacgaaatcgcgggcaagtcaccaccttggtcgactcttgcaagggggcctcgagagcagtcgcccgaaatctcaggtagatcgcttaagatgcgacatgccagcaggagacgatcgcgagagagtttcgcattccatcgttcatagcttcacaagaagaccagagcgtgctaccttaatcggtgctcagcccttcagcggcttcgtcgagcacgcgtgtccgagcgacgttggggtgccctcaatgttgacacatatccagttgccgtcattgacggtcccgttcggcggtgagaggttgacgttctccgcggtgacgttcttgcagagggccgagcactcgaggtcgacgaccgtgttattcttgagcttgcccgaagacgagccagagaagttgacgtaatggacgtcgctgatcgagagcttggccgggtgggtcttgcagtcggcagccgactggaacagaagaggaggagaggtcagcgctcaaggtagagttgtctgaaggggaaagggtgaacggaccgtcatgtagcacctggacgaggaagaaagcgccgccagtcagcgttcagcgtcatctcgcaccgcaggaagacggagacgggctacgcactggtcaatgacgatcggatagtcgatgttctccacgacaaagtcgctgaagagaatgtcagtgacgtagccggtgccgccaccggaaaccgagttggggtcgtcgttgccgccggcaaagaccttgaaggatgccctgtgtcagcgaggtgcacgatctcgctcaggctcgagcagcgaggggagcctcccaagacgcaccttgatccgagccccattctggccgccagccatcgtgacgttgcgggccacgacatgagcgacgatgtccgtctctgcggcgtactggccgagcgagccaatcgaaataccatgtgttccttcacagtatgcgttctcgatgaggatgtctgccggtgacagaggggtcagcatacgtgcaaacgagcgacatgagcaagagaggacgaactcgtgctgttgggcttcatgctgacgcagtcgtcgccgacaacggcgtgaatgccacggatactgtcgcgagacacataggcagtcagcacctggcaggagtctcaaatggcaagccaagacgaacgtgacccgatccgagttgtagatgtcgagcgcgtccgtgttcttgggtggaatcgtcttgttgttcgaggcggagaagtaagagatatcctcgaatagaacatccttgctccgatagatgatcgagctccagaacgggctctgaatgatctgtgaatggccaaccaggaaggtcagcccaacgtctgagcatcagcaagctagcccgactgtaccttgatgtcgcggacggtgatgcgcgaggcgtaggtgatggcaagcgggatcggtcgcgcaaagacacgcgacgagccaccggcgacgccagcctggccgttctgcgcgaaggcctcccaccaaacctggcctgagaccgcaaagggatcagcgagagagggcaccatcagttagccgtttgagctcgggtgcaggccagtaagagacacaccgttgccatcaattgtgccgccaccggtgagcaacacgtcttgtcctccaaaggaccatgcagtcgtcgcgttctggaatccgaggaagacagagttggggctccagtactcaatcgaaggcgtgtactggatcgtgccgctgcgaagcgagagggcgatgtaggtagtcagcatcgaattctgccggagctcaggcgaccagagccgacgcacctcaagttgatggtgacccgcgagagcgtcgtgttaaggaccttgccgacgacgtacgcgcccggaaggtcgatagtgctgtcttgctggcagagctcgttgaaagcgtataagagggccgaggaatcgtcctcggcgccgccgagtggcttgacggtgcaggtgttgcctttgatggtgacctgggggtgagtcctgacaagtagatgcgagacggaggtcagctgaatgaggcgcttcgatggcgacagaggaggacgacgtacgacgtcttgggtcccttgccattgcccttgccgttgcccttgccgttcccattgccgtttccattgccgttcacattgccgttcccattaccgttcccgttgccatagctattgccgttgccattgttgcgagacgagagggcgacgttcggccggccagagggcgaagcgacgacgagtgaggcggccgaggccgcaagagcgatgagagcggacgggatgagcatcgcgggttgagagggtgtgttgcgagggagctcagcctccccccaccacgcccagcagctcggcccttaagagggcgtcgagcacgcgtcgagctgtagaagcctgcgctgtgaggatgcgagagatcggctcagaatagacctttttagaccgacccggatgggccggcagacgagcgggccgggagggctgcgagcccttggaggaggaggcgaacgaggaggaaccgcgtcaggtcccggccgggcgggcaagcaagagtagccagaggcaaagcccaacatcggtcagctcggtctggatgcatgcggccagtcagtcgaagccgttgattgagatcgccggcgagtgaaggtcagaggagcgcaccgggtcgaggcaggtcgactcgagcttcctccgacccgacccgccgacccggcgtgagccggcgcagcagcccgctcgacagcaccctgctctccatcaactttcgcaagcctgctgttgacagcgccgccagacctgcagtctcggagctgcctgcgagtccttggacggccgaaggactcatgcatggatacctgactaaacgacggccgactcgcccttccggccgccagcgccaacgctgctgcccccgctcgaccagcgactgccaccccagccgtcctcccagccactgtcgtcaccgtccctcttgctcgagctgctgctgtcggcctgcgatccgcgcgcgtagaccggcggtgggacaaaagggtcgacgtcgaggtaggcgccggcaggcgagatgacgagcgggacgaacgactcgacggcgaggtcgctgtaggcgcctttgcgcgggaccttgagcgagaggttgtactggggacaggatggcgagtcagtgccggttgaagtcgagggtgaggcgcaggacgcaccgagcaggcaagcagaccccgagcggtctctgggccaaacgacggctcgatccccatcgtcgcgcctttgccgagcaccatctcgccaactacgaccgtctcgaccgcccagcgcttctcgcccggacgacatccctcacctcggcccgatcgagcgcgatagtcgtccatgtcgacgagctcgacagccgagtaccaggcgcgcgtcgtcgaactctcgccgccgccgctgtcggccacacacgagagcgcgggcccgacgcgttgaacgacctcggtcggcgtgccgtgcgttttggtccagaccttgcggatcaagcctacttcgacctccttgtggtccgggagatcgaagggcagcgacggcggcggaagctgcgaccaggttttcgtgtcggatgggacgccagccgtcgccggaaagtcggtctcgaccgggggcgagaacgtcgtgaacgagattcggaaggggtagctgctcttcagccggaaggaagacatcgaggggagcgacaactgagcatggggtagggcgtcagcgaaggcgctcaacagaccaaagcaaatggccacagcgactgactgaagtgaccagaaggctctgcttgccaataagcttctcgcggtaacggtggtcgagcgacgtcgtcaaccagccttggcggagagttggccggtccggcggcaggcgagacgacgatgcctcgctcggatcaaacagctgcgctgggatcggctccgactcgtaaggcgcagggctgcgacggcgagtcgagtcgtcagggacgagacgcagaagagcacctgagcggccgcgaggggacgtaccagaagctgaacgggaggtcaatcacgtcgtcggcgaccctccgacccttgcggtagccgtgcaggacgatcttgtagacgacactggcgacctcgtcaccgttgacctgccgctctttccccttcgccgccgtgcccggctgggcccacatgccgccctggaacgacggcgggagcggctgctcggcgaccgtcggcatgcggaaagcgacggggaggtcgaccatcggcgcgccggtctgggacgtggcggccgtctttggcaagaaggtcagcgactcgcgcgaggcccagatcgtccggcattgcgagagctgcattgagcgggctggaaagtcagtcgaaggtcttgctcaaccgacttgcagcgggggtaaggcgcaccagaaccgtcgtctcttctcgcttgtctgcgcagaggggaagcagaaagcaggtcaacgtcgagcgcgagagcacggagagggactcgaaatgatattgaccacgcattttgcccttcttggccggcgagctggcggcgacgagcgtgccgcagagctcggccgtcaggaggtccgttttgggtcggcgcttgaagaggccctcgagcgcgaggtgcgcgacgagctcgactgtgtcgccgggactgttgcaggcaggccaaaaggtcaagtcgtcagagggcgaggcgagaaggggcttggtccgaaggcacgcacccaaagacggtcgagtgctggcttgcgaaggtcgcgctcagatgcggtctgctgcgagaggagccgaagaggggcatgctgagggcagagtaagggcgatgttcgggctggtggtggtcgagggtcagagcaggccacgacctggtcagcgtcaggcgaaggggcctaagccggtccaggaacggtaagcggatcgggggtgacggcgagcgagcgagcggcgaagagacgacaggcgagggcggccagttgcttcggccggcgagcgcccgcagcagcagcacggcagatgagcccgacctgacaaccccagttctctctttccgagacgtcaggtgcgatagtcaggcaggctggtcagactccccgttaatcgctgtccggcaggcgccgtctcgccgagtctgtactgtacgcccgttcggccggtatgcatgctcggttcccgcagcgcgtcgtccgggcggcggccgacttaagctcgccctcgagagatcggctggccagctcgcaacaacgacctaccttccgcacccatcttcagccatgtctgacgcaaccatctgtggtggcctctgcatcacctgctgctactcgggcctcttctcttggtgcggcgaaagtgcgtccttttctgctgcctgcctgccgtcgacgtcggtcgccctgacccgccgccctttcccaccactcgcccagagcgcaacacttcgaaccaggccggcaagcagtcgggctgcttcccgcgcggctgtggcggcattgacgacgaggacggctttgaccggacggagcgcgaggagcgcgagcgtcgcgcccggctcgccgtcaatgcgagcggggcgggagccgcgccgcagacggtcgctcagcccggcaaggtcgagccaatgctggctatcgtcaacccagagtacctcgccgaagtcgaggccggtaagatcggcggcgttgcacctagggcgtgaggcgtcagcattcaaagccgagccctcggtcccgatcggacggggacgagagaactcgtgagtcgcagacgggcgggtctgctgccgggcaagacatatcgctgatccattggcctcgctctcatcagtcatcaggcccaacatgcctctgaccctccgcctcaagaagcgcgcccttgagcgcagcgctcgccacccgacaatcgacggcgatcgcactcggtcctgcctatgcccaacgtcaggcatccgccggcctgtttgccgccctggccgcatcatcgccgcatatcgcagcgaaggacggtggctcgcttctcgaatcgcggttctcctctgttcctgccgatgggggccgctcgagctgcttgtacttgccggctgcctgccgctgcggcatctgtcacgcacccctcggtctaaaacctcctgcccacgcatgcagtcacctcgactcaaaacttgctctttgaatcaccgcttgttcgacaccgcactgaggtctgtcgctttcgataacgacttgagcatcctcgagggctgaagaagggttgcgtacaatagaggaggaggaaattcgcccctatcgagtcctaatgagaactactggatggtccctgccgtcgtgcatctggcccggcactgaaacgcccagctttccgcacgaccaggtcagccgacatacgcctgggtggacagctacttagctcaggtagtcgtctcgcttgacgcatgtcgccgggtgtgccgattcggaggagaagagagaggagcaaggtgcgtacgagggggggaacagccgtacaaaatgcatacggaggggctcgcgcgggcgcgaacgcgcagcaccccgggccctcctcccctataccaggcgggtcggaaggggcactagacatggatctcggagacagaaagtacgaggcatagtctgtccaagaaagatgagcgcaggtgaatggcgttcggtgccgccagccaagctcttctccgcccgcatcacttgtggcgtctgaaaggatagagtagtacatcgttggcgctgggtctggccagggcgaacaggaaatgtagggtacaacggggttacagagggaggtggaagggtcgagcgagaagaaccggcgcggatgggggccacaggaggagacggacagaagacaggggggaaggctacaagggagaaggggcgacgtctacatgatgacgggtgcgacggcggcggcagcggccgggtgctggatttcgacctcgtcgatctcggccgggacgtcgggaatctggttgtggtgcgaggtgggcaagctgtgtcagtcgtgaaggaggcaagccagaagcgtacagagagggacgcaccatgcggatcaagaggcactggcaaggaaccgtgaggacgagcaggacagagttgacgtagagcggaactacggatgaggtggccagtcagtacagcgagcgcgccgagcggcagacaagcgacggggtccagacgcaccgagcttgtttccggttgtgctgttgagagaataagtggtagagacgtcagctgcacgcgcgaggctcggatatgaaggaagcgcgaaatctgcacctgttaacaccgtaactgactgcttggcccatcgtctcgaaacttctgaagaggccgcccgagcgggcgttggcggccgtgtcggtcgagaagcagccgaggcaccagtacatctacaagacggaagcaaggtcagcggcggcttcgatccaagcccagtaccaagagcaaggaccaagactgacgtaggtctgcgtccagtagccggacctagggcgcaaggagggaggaggacttgtcagcaagatagtagagcttcgcacgagcagagaggcagggggacgcacagttggacgagatagtagggcaggtaagcgatggcccagtgcgagtgtgtaaagtcgagccggagcgtcttgggccggttgccgaaccactgcatgttgatgccgatccagatgaagccggcggcctggggaatgatccagcagaggaagcccatccaagctcttttgcgctggctgaagcgccgcgagtcgagcagcatgccgaagagggcagtcgtgatgatgcagccgagcggcgtgaggaaggacgagagagcacgagcccggacggagaagtggagcgcgagatatgtgctggttgcgccaccgtagaagaacgagtagaagtctgggagaggagggagggcgggacgtcagcgcggatcggcaggggctcctgttgtccggcaggaggcccattggccggcagacgcacaagggatgatcatgacgagcgtgcgccggagtttgaggtgtcgcaaaagcatcgtcatctcgcgtgcccaactgatcttggccgtgttggcgaccttggacccatccttgcggcgtactcgtttttggtgcgagaggaggaaggctgcgaagacgccgagacactcgaacgcgatgaagcagaggtaggtgctccgcgagacggcgccggcgcccttgttcctgatgttgttactaagcgagatgatgccgccggtgagcgagccggcgttgcgcatgccaacccagatcgagaggaagagaccgcgctggtgaggcaactgtcaagggcaggacgaccatcagctcgtgagatctgctgcatgaggcgaagcgaggacgaacagggtaagacagcatcgctgtcgactcgccgacgtataggcaggcagcgaagagaccgttgacggccttggcgacaacgagataaatctcaaccccgtacactaagttgacgtagaaccctgtcccactcagagggaagcagagggcggcgaggatgcaggcgttcttgatgccgatttggttgatgatgggcccgccgatgaaggcgacgacggccgaggtagcgtatccagcggcggttgcggcgttggccaagtagggcgtgctgaggccaccaccgccgagcccgctaatggcgtcgctcatggagggcccacagaacgacagggtcccgaatataatcatttggaaaagagtccctcggtagaactggcagagcgcaggagtcagcaagtgttcggttgaagaagggagggcgcgaacgcgcaccttgcgccagccgcgcagctccgtataggacgagtcgtcctcgacgacctcctcggtcccgacggtgtactccgggtccttcgagtcgagctccttctcgagccgttcctcgtgcttgtcgagcgtattcatggttggttgcgggggaaggggagagggagatggggttaagagtgaggggagagagtcgtcgacgttgccaatcgcctgcctttgactggctcgcgtcggacccctgccccgcggcgtggccagaccctatcgctcgggtcgagcgctagagcgcggcaggtcgcggctacgggccgggtcagctgcgaggcaggcgggaggtgagccgacaagccgaacgccccttggaccaagcaatccggcctctcacgccaggctccatcgccctttccacgaggctcgacccttcatctgccaatcgaccgatatggtcccgtcaggaggtcttgcggccatttcgccgtcggcaagcttgacgccggcgtcgcagatggccgacgacgggcagagctctatcgccactcagcaagcggggtcgaacgcaatcagcggccgccgccgtcaaaagcgcctgcctcgaggcgctctgctcgccggccagccgagaccctgggcaggcaagagttgcgtcgaccgatgttgcaggcgcgagcaagcgggagcctgcagtttgcgtccgccgcgagtcggacgagctcgataggcctgataatcgaatccggcgcttcagcaggctgctcatctcggcccttctggagaatgccgtagactgcaatcaagaggcgcctcctacggcgggcgattggttcaggtctgctggccgtcttcaggctcgagtttgtcggcgctccgagcgccctgccgccgacgtgcaggcgccccccccttccccccaggtcggcctggcgacgcgccataccgctacctcgtagagcgcacagcagcaaaaggcgggcttggccgaataggcagacgccgcttaagcaatcagtcaggcagtcaggtcagcgaggcagaagtgcgtgcgagctgccgtgtgcagaggcgcaggcgaggtcgagctcagcagcaagcgccgcccctctgtcgctggcaggtcggctagccgcctcaggctgacaagcgtcgcctgcgacaaagccaggacaaagccagacgatgactgacgggcctcgagagcagaccgtagagaaggaggcagatcaagtgcgagcagtaatcgcatgtcgagtgacggttgcggcgagaggtgagcaagcaagcgacgtcgcattcaagaggcggagaggcggcgcgagagcagtctccctcctgtcgtcgacctcgagccctcccgcattcttcctcgcaacacccaggatggcagcgttcggccaggactgctgctgaagactaggcgggatgcttggccaactccgtcgtcagctcgacctcacccggccaggcggtagccgtcgcaagccgtcggctcttcgtcggctcggccatgtccgcctgcccgccagcgataccattcgactcggagcccgcccaggaggctgctgccgctctcccaccacccgcccattgcatctcgtaggtcctgctcctccctgttcaatgcgagagtcgacgaggtgcacgacgctcactatgcccgggcctgtcgctcagcgcttaccatcgaccagcctgcgtcggcccccaccatctctggagactgagcctcgctcaaccccgaagccctactttcgtcctattctgctgtcatgcctccgaacaacaccctcctacctgtgcctaaccggacggtgccgttctggctatgcgaagtcgacccgctacttcagcgacatcggacgacggccgagctcccgacggcgccggttgacgtcgtcatcgtcggcgcaggcctctctggcaacctgacggcctatcacctgctcaagaaggacccttcgctcaaggtcgtcatggttgaggccgacgactggtgctcgggcgcgacagcccgaaacggtacgtcctgccgcacacgccctctgctgcgccgtacctcctccccctcccatctctctcaccaccccttggagaagcgccgcctcccctccatgatcgatcgcggcagagagtcaattgccatcccgccagcttgtcctgacgcctcctcatcctaccagggggacactgtaagccgatgacctatcacgggtacgaagaggagcgaaagatgcggggtgcccgggtcgcgaacgacatgttcggctttgaggagtcgcacctcgcccggtacgcggcgctcgtcgaggccgaggatattgactgcgacctacacgtcactcgaggtgcatccttgcgctcggtcgctcactgagttcatcgaagactgacattctctcccattctgccagcctgcgacgtcttctttaacgaggccgaggcgaaagccggccaaagcgctttccgtgcgcgcaaacgcgacttcccgcagtcggtcgtcgccggcgacctgcaggagatcagcgacccgcgcgagctcgagcgcgtctcgggcatgaagggcggtcactggggcatcacctatccggccgggcacctgtggccctacaagctcgcggccggtcgtgcgtgcaagctctgccgattcccccgcactcagcgcagcatccggcgctgacgcgttgacctcctccgccagtcgccaaggtcaacctcaaggccgggctcaacctccagacgcacacgcccgtcatgtcggtcacgccagcctcgtcatcgtcggccctctggacggtcaacacgcctcggggctcattacagacccgcacgctcgtcgtcgcctcgaacgcttacacgagcggctttttgccgctcttcaaggacaagatcgtcccagtccgtggaactgcgtgctcaatcacgcctcctgcctcgcacacggtcggccgcgcgccaggcccgttccgcatgtcgtacggtcttcggcatggcaagggccagagcgactacttgatcccgcgtcagggccggggccggataccgggtaagggcgaccaaagcttcattcttggtggcgccaaaggtcttttccagcacgacgagaaggtctggtacaactgcacgaacgacgacgagcagattgccggcgcgcgcgagtactttcaggcctacggccacaagcactttaccggctggagcggcgatggctccgaggtcgatcatgtctggactggcagtacgtcctgccggcgtcttcttgaagaagctctgctgaccgactgcctcgttcttagtcctcggctactcgaacgacctgctgccctacgtaggcgaattgccttcacaaaagggcatcttcattctcgccggcttcaccgggcatggtcggttccgagctggtcctgctttcctcctccgcagacgctgaagcctacttctgagtcctctgatcgatcaggcatgccccggatccctgcttgcgcgctctcgatcgccaacctcgcccacgcccacacccggtcgtctgcctcggcaccctcgactccttccgccgccttaactgccttccagcaggcgatcccggcgccgtactgggtgacggaggctcggctcgccagcacgacaaatttgatcaaagggatgatgggcagcaagggctctggcgagggccgcgttgccgtagaagagccagccgacctcaagggcgccaaggtgctcgccaagctatagaggtctcgctttgtcttcacattttatcgatactctaatggagtggcaccagacttgcgacgaggaagtgagaaggcgacgagtatcaggcgacggccgacggtcgaggacaagcaaaggcgcgttcgggtcgaagtctgctgcgcggcctgcgagttcgctcccgccatcagccttgcttcagcccagtcatggacgacgagcagctgggaggagccgacgtcgaccctacaccttcgacgagcactcgcagatagcagcaaagtatgtggccgacatcctcgctctgtcgcatcgtcgtcagcggaccatcgaggctgaccgttggcaccttgactgcagcccccactctctcgcgctcgttccgaccctgaccgacgaccgacgatggcttccactacccccgccatcccgctgctgaccgccgctcaagggatcgagcttcagaccctaagtcgtggtgcggcgccagctccagacacggccgaggccgtccaaggaccgctcgacgcagccaagggggacgaggcgaccgaacctcagccggccgagctcgatgcagccgacggcagctcattgccggatcagcagccggacgacagccttcctgcttggccgttcgcctgcctgatcctgcagcacgcttcgtcgtcctggacggagcgaacgtgggaattcagcggttacctcttccttaccgccctctttccggcctcgttcatcccggctgcgctgctcggcctcctgacgacgggcgccggcctcttcttcagcggctgggtcggcggcctcgtcgacgaccgccgtcgcctggctttcgtcaggtcagccattgcgtcccagaagctctcggtcgccacggcctatgccctctttacaggtacgtcggtgggcgagccgaaaggtggcgcacaggcactctagcccgtttcaggaagtcccagccctacctaatgcatctaaagctgactttgctttccttttgtgccatgcagtactcttcatcccgctccgcgatgcgacaaagtcggcctggaaggcgcctggagtgatcctgacgcccgccgaggaggccgctcgcagcctacgctgggccgtcatccttgtcttggtcctcatcattgcgtcgggcagctcagctggcctcgcttccggcggattaaatacctcgatccagcgcgactgggcgatgaccctggccggagatagcacgcgcaaattgacgacgctcaacacgtggcttcgtcgcaccgaccttctatgcactcttatcgctcctgtatgtcgccttctccgagcaacccgcttcccaagtgcaggctgacgccatcaggtcatccctcgcagctgattgtctcggctctaacaaccgcaacgtcgtacgagttcactatctgcttctacctcggcttcaccgtcctctcgaccggcttcgagtacgtctggatcgggatcgtctacgaagcgttcccgatcctcaccgaggacgaggccgggcggcaaggccgtgtcgtcgaagccaggatgcgcaagaaggccgccggccggcggtccgtcccgcagctcgttgccgcaggtaaggagaacatgctgcagatgcgtcgcgactgggccgactttgcctcgcagccgatcttcctgagtgagtctgtacttctccgccgcacctgctcattcgctgacgccacctgaacaggctcggtcgcactttccctaatctacttgcagacattaagcttcgacggtgttatgatcgcctatctaaagtcgcagcgcgacttttcagacgccttcatcgctggcatgcgcggcctctcggtcgttatgggcctcgtcggaacggctgtcatgcccttcatggagcgccggatgggcctcgtccgaggcggagcttggagtctctggtgcgtgcacctcagagactggtccgggggatgcagctgacgctatgacgctccttcagggccgagatcgtctgcctcatcccggtcgtcatcactctctttgtcggcctgcctcagaagaatccagccggccaaggcgacgcctggaacgtcggcatatttttcgccttcatctcgctctcgcgtatcggtaagctgctgcgaggcagcctcccgccctctgtcgttccaagaccagccgctgactcacatggcgcgctctgccggcaggcctctggtcgttcgacctcttccagctgcagctcctgcaggaggcgctcaaggaccacccgaggcgcaatcgtttgacggcgctccagctggcactccaggccttctttgatctcggcaagttttcaatggtcctgggttggtcatcgccggccgattttaaatggacgggcgtcgtctcctttggcgcatgtctcctggcaggcggcgtctacagcgtctacatccagcggatgcgtggccatatcttccactggcagaggaacgtcgaggacgactcgaccgacagggcgtctggcggcaccgtcatgccgcactggagctggaaggcgccggccaagcggcgcgagtggggcgagggcgtcacccggcgcagggtcgagacgctgacgagcgagtcggccgtcggtgtcgcgcgcgtccagagcacgagctagtccgctgccatccggatcaatgcctcttgtatgtcttttttatgactggagcatgcgaagtcatggcggcagaaaggagatacatgatacaacgagtgcgaaccgaatagctccgagcgacctcactttttgccccacttggcgacaatgcccttgccaagctcgacgaggtcctttgtcaccaagtcggccttgccaaagatggtctcgcactcgtcgttctcgtagatcaggcagtacgcagtctcgaagctgggaggagaggaagaaggggtgtcagccagatgagcgacactgccgcaatagatagagcggtaaacgcacccggcgctcttcgcggctgcgatgtcccatgcgtgggctgccgcaaagatgctgacctcgccctccatgtcggagccggcctttttgcgggccatcttgtagacggacgggtgtggcttgccagacgagcacatgtcggccgacaggatgttgttgagcggcatctcgacgccggcatggtcaaagtagcccttgacgcggtcgacgttggcgtccgaacagcaccagacctgcgaccggcaagtgaggtggcggtgatctcgtcaggcgacggcggtcgagcacaaagaagcgagcgacataccgtgaagccgccgtcgcggagggtcttcatcatctcagccatgcctggccgcggctttagcttcttgtactgcgccatgatgtactgcgcaggcggtgggagaagagaagaggtaagcgtcaggtgcaggcgagaccggccgctcgaccatcgcacctcgacgtcctcgggcttatagaacgattccgggtcggcgacgcctgcctggaagagcacgcgcgcaaacgtgtgctggaggatgctgaagaagggcttgtactggccgatttgcgacaagtaactgtaatccctttccgtcccgcagacccactggaagattgcgcgtcagatatactgttcgagctagcggaccgatcaagcggtactagactcctcccgaaggagagaattatgctgcttgtcgagaagtgggaggtaggaggcagagccggtcgagggacgcacagcgtagaacagcagcttcgagctcaggccggcctccttgagcttgtctccaagccgctcccgaagcgcctcagctcctgcgtcgtacgagaagcaggttccgacgacgtcgactgcgagagagagagcaggctcagggtcagtgaacgacgctagaagcgggagccagttggccgacggggcgggacgaggagggctggccgcacagactacagaaggcatggctgcgaggtgagagatggggttgaagtggggtgagggtatgaagggtttgagtcggtcgacgagggtgatggtcgaggacaggttaaggggacgagcgactggttgggtcggaggtagcgatggaggcagaggtcggccagctccgacgttcccgcggctgaggcatcgggccgctccgaagcctccttcgctccgacccgccgagatagtcgaactggggcgagtcggaagtgcgagggcagccagagctgcaacacagggcaaggcagctcgacatgagccaggagcatcgttgtcgtcaggatgacttgcaaggcagaagctcgaggtcaacgcatctcggcgtcgcctgctgcggggtttctttcggccggccgagcttgcttccggcgcttcgcctgacgatgcaccatccgcaagccgcgatgcaaaacgaggcaggtcggattcctcgctcacagcagacaatataacgagactcgagagccatcaaagaatgggcggcataaagtcgcccagccagtaggcgacagcgcaccgcgccttcgattgacgcgacgacgagcgaaagggtaccgccggcaggcgaagggtggaaggagtgacagagcgagaggacgatgtgcggatcctacgagagagagggttgcaaagggaaagagaggacgaggtgcgatgcgaaggctcaagcccggtggtcgcgaaccttgtgcatgcgcttgccgaggcccgagatgcagctgtcgcgcgaggccgtgcagccctgccaatcggggtgcggctgcccgacgtcgaggcacttgttgtacgcacggtagcagtcgttctggtcggtcgccttggacgcggcggcagcagccttggtggtcgttccgccgacgacggcagcattcgaggtcgagacggcagggactacggcggccttggaagacgagacgacgggcgctggcttggacgacgagatgaggaccggggcgaccctggaggtcgtgaccgccggggcggccgaggtgacgggcttgacgaccggggcgacaaccttggatgacggggcagcagcgacgggggtcgtcgagggcttgacagaggcggcggtcgtcttgggggcgacgggcgcgggggcggcggcaccagcgccgttccagacggcagggcctgcgagacgacgtcagagggtcagcgagtaaagaggcgatcaagcaagagagagagaggaggccgaccaggaatgacgtagttcttggggtcgttgccagagtaaacgtcccacttgatgccaggcgtgctgtccttgtactccccggggaaggcgacaccggcagggagcttggccgagccaccagcagtgaccgtcagctgggcgcaggacgggtacagctggatgccccggtcgcggttggccgtgtagagcgagtccgactcatgcagggctgcgagcgatggtgaaaggggagcagtcagcatgagcctcggagggaggatgggaagcaagaggaaagatgcaccgaggatctcgtcccgaatgaggtactcgcccggagcgagcgaggccggcaggacgacatcatgcttgccgcggttggcgatgaggttgtcgacagcccacttgccgttagcgtagctggagtgaggtgaatacaggggaaacgtgacaaggagagagcaaggtcagcgatgggggaagcgcaggcaaagcaagagcaggacgcacccagactcggcaattttgacccagacggctccctcgccgtttgaggaggccggggcgaggtaggttacgataggtccgacatggctggccgcaatgatatcgtcgttaaagttgtcgctgttgtgcagggtggttgggcgggttagcaagctgctcgaacggcagaacgagcgagagtgacccactggaaccaagtcggggtgaccttcgagccagccttggccgagaaccgggccgcgacagcagtcgtgccgccaacgttgcagcggacgtcagtcgaggtgaggtccttgacggggttgttgttggggggagtgcgaatgaagggagcgatggcgttggcgttggggctggcatcgactccgtcaactgaccacgtccagacgcgggcgtgggccgagaccgatgtagcgagcgaagcagcgaggacaccgacggcaaggacgcgggacattgtcggcgaaggaaagaaatggaaggaggaagggcggatggaggagaagacggcaaagaaggctcaagccgctcgacttttaaggcctcgctgctcgtcgcgccatgtgatgcgcccccggccgagggagcgaaggccccaagagagcttctaagagaggggaggggccaaaggactttgtcagagggaaggaaggccaagaggggctgccatcggccgacatcggggccagtagaagaccctgccgggcttcaaggggttgaaacctcgagcgtgaaggccggccactccagagccggatcggcccggctcagagctgcgagagcaggaatggtcagcgtcgggtctggctgttgaaacaggggatcgtcctgcactggagagaggagacgtacgggcatcacgggcgacaggggcgtgaagccggcctaagcaacctcctctcgacctcttggccgacgagcaaggttcagttcggctccagcagacagtcaggctcctccagagagccgacgctcaatctacacgcagcttcggagcatgagctacgcaagaaggccggcgagcgagaagggcaagctgggagctgatccaagggtgagctgcacgcagagcgaagcgctttgtgtcggcggtcagcccaacgaccggaccgggaagcctgccaccagcacgccgaatcagcaagacgaggagcagaggcgtcgacgggaaggctggatctttgtcggccatgctgtcgctggtccgtcgtcgaatcggctggggcaacaaggccagccagcttgcctcgcccgcgcagcagcggcagtcggcggcggcggcggcggcgcgaaagaacgagccatggaagcgagacgcgaaccttgaacgcttctcccggacgcccaccttgttttgccccttctcgtctagcctacagtttgtagtcaagctcgctcccggtcgacgcccaggccgttgtcgtctcgccctttcccttcacccttccaacttctgtcgccggccggtccgtcgacgcgctggcagcagcagctcgctcgcccctccgccgccctgcctttcgccgcgtagctcctatgtctgtcgtcgcctcttcgcctgcgggcagctcgtcgctgctcacccgctacctgtcgtatccggtcgtcgccgtcgacggctcgacgcgctaccttaagggcccgaaggacctgctgtttgcgctcggcgcgttcgccgtcctcgtcgtcctgcgcgaggtgacgatgcggctcgtctttgcgccttgcgcccgccgctgggtcgttgaggccaacggtgacgctcgagcccgactgacggccgccgaaggcaagcctgctcggccctcgaccggcaaggagctccgccggcagcagaaggcggcgacgcgctttgctgagcagggctggtcggccctttactacacgatcttctggtcgtttggcgtcgtgcgtccttgcccgtctctattggggtcgtcggcacctgccagagtctgacgtcttctctaccacgacaggacatcttcctctcgtcgacttcgtaccggccgggccacctcatcccctttgactttgacgccgtctggtcgtcgtaccctcagctggccatcaccggcgccgagaagttttactacctcttccagtacgtgtgatagcagctctgcacaagtcagcgcaggacggagaggctgaccagcgattcttcacgcaggctcgccttctacgtccaccaggccgtcatcgtcaatgtcgaggcgcggcgcaaggaccactggcagatgttctcgcaccacgtcgtcaccattttcctcatcactggcagctacctgaccaacatgtcggccgtcgggtgagcacctctcgctccttcgcctggcatcattcgccgtcttgcgggtgggtgactgaccgggctcaatcatcctcgcgcgcagcatcgtcgtcctcgtcctgctcgacctcgtcgacatcctcctcccgacggccaagatgctcaagtactcgggtcttcgtgccgccgccgacgccatgtttggcacgtttgtccttgcctggctcgtcacccggcagtttggcctcctgctcgtcatcgtcagcgtctgggaggacgctggccggctgatgccgattgacacgcccgaggaggtcgagattggcccttacgacctggtgcgtctggttctgttcgcggtccctgccctcgccgctgactcactctaacgttcgcccctcacgcagcacttcacgcgcggcatgtggcactttttcctcgtcttcctgacgttcatctgggttctcatctgcatctggtttgccatgatctgcaacgtcgtctggaaggtcctcaccggcgacgctgccgaggacacgcggagcgacgacgaggaggagtctgaggaggccgaggacgtgaccccgtgcgttcaacttcaactgtctttgctgccagagtgccatactgacgcgcgaaaggaacctgcgccctctgccgcctctcaggatcaagatcaagagcgccggctcgacgacggcaacgtcggccgccaaggacgcggacgcccgcaaacgcaggtagcgccggcatcccttcctccctttcttattcgacctctgcggccctttcttttcctgatagatatgtctctgtggtgtatgcttagccgccctccaagaaaaatcggcacagatgcagggctctccctgcattgtcgcccgccagcaagaggcacgccccgacgagaggcgcgtcgcgaggtcgcgcgggcggagtttaaaagtgacccgacgctgcctcgccagcacgacgggccgagacgcctcgcttcagccgaccgacgccaacctcgttccttcttcctgccacagcaccactcgaaacgaaccatgccctcctacacgccgacacctccgcggagcaccaaaatcgaccgcgacgtcacgcccgagctcaggaggtccgtctctgctgagcttttgcgtcctgatgcgctcaggccagacgttgacctgcttccctccctccctccttactgtgaccttgtctgcgttagcaaccgctcgcactcgcaccgcgccccgacggaggagcgagagcctgagcgctcgcaccgggccgattcgcaccatgtttcctcgcacaagacgtcgtcccaccgccgctcgacgcgcgactacacgcccgacgaggacgacgaggaggaggctcgccgccggcgccggcgccgcgagcgcgagcgtgccgaggaggacaccatctcggaccccgaggagcgccgggctcggcgtgctgagcgcaaagaccgcgagcgtgccgaggaggaggaccgctacggccgccggggcgaacctgagggtggcgatagcaagcgccggcgcgaccgcagccgcgactcgcaccgctcgcgcgagtcgggccgcgagcgggagcggtcggctagggacgatcggccgtcgcgtgagcagcgcgagtatgagcgtcagcagcaggaccgggcgatggaggacgagcgccgggagcgcgaagagtgtacgtctatgaacgctgcgctgacctcgccgccgctcaatcactgacgctctcgaccctcatcttcactcagaccgcctccggaacgagcgcgaacggcccgggcgtgaccgcagggatgatcggtacgcatacaccctgccccaatgcagtaccttgtctgcaggcgctgatgaccctgcttcgccaccccttgccagctctccgccccgacgccggcgtcgccactcgccttcatacgacgccaacggcggccgcgcggccgatgccctgctcgaggagatcgactcggaggcccggtccgtctgcgtctcgcagcttgcggccaagctgacgtcgcgcgacctcggcatgttcttcgaggacaagctcggcgagggtgccgtccgcgacgccaaggttgtcaccgaccgcatctcgcggcgctctaaggggtccgtcccgtttcctgctgcaaatcgttcaggttgaccgccagaagctgacgcccgcccccttcgctcctgctagcatcggctacgtcgagctcgacgctctggagctcgtcgaacgggcgctcaagctgagcggtgaggtcgtcatgggcctcccgatccttgtcgagctgaccgaggccgagcgcaacaagcaggcccgcaacggtgtgcctggcatcggccccatcggaacaatggacggccgaccggctcaagggtgcgtcctttggaggcagctcagtcgcctttcgctgccttgtgctgaccttcacccactgctgcagacctggttccctccctcctctgcagatgtcgccgtccggctcgcttcctgcccgtccctcccaggctgctggcgcccttcctggcggccagctccaccgtgaccgcttcgccggcgccgagatcccctaccatcggctgtacgtcggctcgctgcactttgacctcactgccgaggacctcaagcaggtttttgcgccgtttggcgagatcgagtttgtcgacctccacagggagcccctcaccggcaagagcaagggattctgctttgtccagtacgttctcgttgcgctcgtctctgcgcggcaggtgcacgccagctgacgtgatgcacccctcttccgcagatattttgacgttgaggcggccaagacggcgctcgcgacgatgaacggctttgagctcgctggccgccagctgcgcgtctcgactgtcaacgagaagtctggcccgcccggcggcggccctccgcgtccggctgtgcccttcctgaccggcggcgcgcttcctcttcctggtggcccggccgtcacgggcgccaacgcgggcgtcgctagcgagggcaatcggcccgagagcctcgaggagcaccacggttcgtctcccgccgcctcccttgaccggtctttgaggcccatgctgaagcttgtcgtcaaccttctgctctcaggtcagcgcatggaccacaacatgcgccagcagctgatgatgaagctcgccaggcaggacgttccgccgccgacgcagcccatgatgggcttctcgacccctgctgcccctccgtaagtccctgcttgtgagaggacgaacgaagtgacgcttgctgacccatccgctgtctgcagctcccgccctagcgtccccattcagccttccgtctttgtgctcgtcagcaacgttttcgacccggccgagtgcgtctgttttgctgcttgccagggtttcgtatccgaaacgctgacgcccgtccttgtgctacttgcagggagaccgagaaggactgggacactgacctggcagaggatatcaagggcgaggtcgaggccaagtacgggcctgttctcaagatcaaggtcgagaaggagtcgcaggtgcgtcttactggccggccatttgcggagccctcgtgctaacgccttgcacccctccctttccgtttcgcagggcgaggtctacatccagtttaactcgcttgactcgtcggccaagggcgtcgctggcctcaacggccgcttctttggcggccggtcgctcgccgctcacgtgagtctcccatagctgcgctcgagcaatccctgcgcccagagactgacgcccgtcatccttgcccctcgcttctagttcttgcctgaggccctgttcaaggcgcacctcaactgattgcgtgtgcactccccgctctggatgctcggcccttgacacgcgcacgcccctgcttctcgccgtctagctcgtcgcacccaagccgtccctctccccctttttgactctcagatacccgtcgcaggcatctcgagaggcgcgtacctctctctttcttcctctctccctttcgtccgccgtcgccagggttcatttgcggccctggcgctcgactcaaaaagactgtctttgatgaaccgtgcagatcgatagagaacgtgttgtttgattgcatgccgcgccgactcgcagctctggcaagctgggccgcctgacccgacgacctcgagggtgagtcgacggcacgtggaggaaagcgagagcgggcattcgactatgtgcatggacaattcaactctgccttgcctcgcctcgctaaagcctcgccttgctcgatgcgctggagagaagcgcggagcacggtcaaagtcttcgcctacaacggccgcagcccgttggcgcaggaagtcgtcgtcggaaagaggcagaccgccctcttgtcgctgtgctctctcacgatggtcagcatgggagggcctgctggcctgctgatggacgccgtcgagcagggccgaggtaaggaatcaggggctccggcggcgcttagcgcttgccgactcggagatgggcggcgcagaagatcaagccgggcgtgcagcctcgctctctccttcctccccgaccagcatcctctctcctccaccttgcactctcaactcttgcctataccacactgtacgtccctcctgctcaatgcgccttgcccaggaagggggtacacaagtgaggcggctctccgtgtagtcgcggcagcgtcgctgatcagttgcgacctccccgtatttgacctcctctcccctagcgcctgccttcaaccgtctctctctccccttcttcaagacccgcgcccttcccggtctttcttttcggaccaccacctgccccactgctctatgctcgctagcctcctcgcgacctcgtcctccctcgtcgcccgcacctcgccctcgtccttcctcgccgccacagccctccgccgcgccatgtcgacctcgctcctctcctcgacgccgcccgccggcctaatcaagacgcccgaggcgctcgcaaagaagctctcgctcaagaacccctcgctcctccggttcgacaactacatcaacggcagctgggtctcctcggcccgtgccgagtcgacgtttgacgtcaacgacccggcgagcgacgagctcatcgcccagtgccccgacctcaacgccgacgaggtccgcgaggccatcactgccgccgagggtgcccgcaagagctgggcggggacctcggtcaaggagcggagcgacctcctcctcaagctcaacgccatcatcgccgagaacacggaggacctcgcgaagattatctccatcgtgcgccctctccttcccggtgctaaacatccccccggaccgggtcggctgacccacctcaacctcttttaacctcctctgcaggagaacggcaaaccgctcgccgacgcaaagggcgagattgcctacggaaacggctactttgactggtccgtcgtcgtcaactcgggcgggctggcctccgaaactgctcgctgaccaggcgcgcgcggtacccttcctcatccccgcaggttcgctggcgaggcccttcgctcttacggcgacacgatcccgtcggcgacgcccggcctgcgcaacattgtcatcaagcagcccgtcggcgtctgctcgatcctcgcctgctggaacttcgtgcgtcgctgctgctgcctgcttgatctctcgcgcgtcttccgcgcagccgctgagtgccttgcctgcccttcatgcgcttctagcccaacgccatgatcgtccgtctcgcccaccgcctgacatcactcgccagccaagatgctgaccttgttatccacgctatacagacgcgcaagctcgcccccgcgctcgctgccggctgcaccgccgtcatcaaggcgccgccggagacgccgctctcggccctcgccctcgcggcgctcgttgagaaggccggctttcccaagggtgtcgtcaacatcctgacgaccaacaagaacacggtcgacgtcggctacgagatgacgaccaacccggacgtccgcaaggtgtcgttcaccggctcgtcgcccgtcggcgccctcctgatgaagcaggcctcgtcgacgctcaagaagtgctcgtttgagctcggcggcaacgccatctttgccgtctttgccgacgccgacatccccaaggctgtcgacggcctcgtcgcgtccaagttccggctctcgggccagacgtgcgtctgcgccaaccgcatcttcatccacgaggacgtctacgacgagttcgccaaacagttcattgctaagggtccgtcttgcgctctgatcgccttgcctgcttctcagtctcttgctgaccgtctcgtcatccatcagtctctgccttcaagctcggccacccgctcgaggccggtgtcacgcacggtcccgtcatccacgcccgggcaatggccaagacggctaagcacgtcgaggacgccgtctccaagggcgcgaccgtcgccctcggcggtaagcctctgcccgagcttggcccgcacttctacgcgccgactgtcctgctcaacgtcccccttcggggcacgctgatggagcaggaggagacgtttggccccgtcgctggcctgatgaagtttaagacggaggatgagctgattgagcgcgcgaacgacacgccattcggcctcgccggttgtgagtcgcaactcaaccgagctcggccagtgacaccttgctgaaccctccctcctctcttccaaagacttcttcacccaggatctcggccgggcattccgcgtcggcgaggccatcgagtgcggcatggtcggcatcaacaccggcctcatctcgcagacgtgcatccccttcggcggcgtcaagcagtcgggctttggtcgcgagggctccaagtacggtgcgtgctcatcatcctcttcccgccggtccgtcgagcgtctgctgacctgtcgttcccgtcttgccgcaggtctcgccgagtaccaggtcacgaagctgctcgccatctcgatcgcatgagtggcctcgtttctttgctacgttctcccctcatttgtatacctgtctcgcacacctgctctttccctctatctctttctccggtgtacctatgtcgcttgctctccgccgtgtcgagacgctggaagagacgcgtgcccaaatcgatgacccaaccggggctctcgaagtttcgcagcgcttcagcccacccgccgccgccgcccgaaactcccagtcgaccagcatctttctactcgagcgaacgcttcgacattcagcacccgcagacgcctcttgtgagtccttttctttgctcgctgcagctactgaagcgggtgctgggcgcaggtcgagcgatgtacagaggggcagcgacgagctcaaccacgcgccacgtcgtccggacgaagctcgctgctctggctcatccagctcgtctgaccgagggggcggcctcacggagacacgagcagctctactcggatacgagtccttggtcttcgcctatcttcaagcaatcgcagtctcgagcttgctgggagcgacccgcggtcctgggcagattttggacgctgaccttctcactcgctcgctgtgctcgtcagaccaacctacactttcgccaccgcgtcccattctctccgaaccaataacctaccatgacgacccctcacacggaaatgcactttggtccctcgtggatgcaaaactcgtcgcgcgccaagtcgtactcgaagcagaccgcccctgcctcggccggcggcgacgacgcgagcaacggcgcggcgcctcacccttcggccctctcgtactcgtccgtcatccgcgagcaggccgcactcgccaacggcttgcccgtccaggaccagcccggattcgccgacgccgcacacccgttccgctactcgaaggagtacatgctcggcctctggtctgacaacaaggaccgcgaactgccgatcgagtttgagcggtgggaggtcattttccgcccggacggcggcatgcctgctggcctcaaggacatggacgaggttgagaagcgggtgcgttcaggctcatggtcggctgggctccaatcgtggttcatcggctgaccccgctgccgtctgtcgcgcaggccttcggcatgtcctacaaccccgaccggcgcccgacggccagcaccgtcaactcgagcgcgtcgctcgcgaccctcgccgacctcaagctcgacccgcctgcccgccggcggcaggtcaccggcggcaccgaggctctcaacagccccgtccgtgagcgctttggcggcatccagggcggcgtgctcggcggcctcggcttcggttcaaaggagcctttcgctagcgcagccggcgcagccaagggcacttctcgtcgcaaggacgaggcttctggtgcgtccatcgcaaccgatggcctacgaagctcgtctgctgacgctcgatctgcccacttgccggagcagctcctctgcccccgtcctccactaactcctggaggccgacgcgggctctgtcgtccaatctgccgacggctgagcctacgacgcccagctccgagacgccgcccaccgacggccgacgttggcgcactgccaccgaggagcctgctgccgctactcctgtccccgaccgggtcggcgctgtcggcggcggcttcaatgcaagtgcctcccgcgctggcggctggcgtgagcgcgagcgcatgaagaaggccgagggcgagctctcgtcctctgccggctggacgtcggtcgacaaggccgacggcaagaaggcccgcggcactggctcggctggcgacgacaaggccggcgaccacttcagcaacgcctactctgccctcgaccaggaggaccaggacgagggccaggccgcgcaagccgacgccacgcccgccgcgccccagccgagtcaggagcagctcgagaaggacgcgctcaagctcgtcaactggacgtacaaggacccatcgggcaacgtccagggcccgttcccggcgcagaacatgcacgactggaacgcccagggctactttgcgccctcgctcctcgtcaagcgcgagtcggacgcctcgtacgagacggtcgcgacgctcacgctcctctcgcccgacccgaacgagatcttcttccagcggccggccgtcaaggcacccgccccgcccggcctgatgccgaccgcggcccagatgctcggccttggcgccgtctcgacgccgctcgtcagcccgctcgtcggctttgccgacccggccgtgctcgagcgcaacccagtcgaccagttcatgcagcagggcgctgtcgagcccgctcgctgggccggcctcggcacgccgacccggcagcacgctcaaccgtttggcaacagcggcctcgctcagcagtcgccctaccagcagcacagccagccggcctttgacccggccgcacagctctacggacagcggacgcctgcccggcacccgttccaggacgcggcgcctttcggtatggccgccgcccagtcgccctacgcctcgcccctcgtccagcaccacgctgttgctccttggaaccagccgcaggccgcgcccgcccagcagcccttcttcggcatgggagcccctcagtacggcgccgtccccgcctcgaacgctggcttcggctaccctggcatgggcaacgttggcctcagcggcggcgagccttggattgccggcggtgccgccatcaacgactggcgcaacgcgatgtcgcccggcggccagaacctcatcccgcagcaacagcagcagatgacctacgctcaggatctgatggcccagcaaggtcaccagcagcagcagcaacagcagcagccacagatgtggccccctgcggccggtcagcaccagcagtcgctcgcccccggcccgatcgagccggctgccgaggtgcccgcccagcaggtccagcagcccgccgagcccactcctgaggccgagaacgcgcccgtcgaggccgctgtcgagcccgagactgcgcgtgaggctgagccgactcctgccccgtcgtcgaaggcctccaccgcgccgtcgcccgtcaaggcgaccccggctgccgagaagtcggtcgctgccgcctcgccggcgcctaccgccaaggtcagcaaggccgaggctcgcaaggctgctgctgccgccgccgctgcatcggctgcgactcctacggagcccatcgagcgcgctgctcagccctcgcctgcgctcaaggtcgctccatgggccaagctcgaggaggaggccgccatgcccagcccgtcgctccgtgagattcagcaggccgaggcgagcaaggcagctgcctctgcgcccaagaaggctgccccgccgccggtagaggctgcggccaagtcgagctcgccgacgtcgacgacgaccgtctcttggggtctcaacggcaccaacacggccaaggtcgcgcccgtcgtcgcccctgcgcccgccacctcgcccgcgcccgcggccgtctggcagacgtcgagctcgaccccctcgaagacgctcaagcagatccaggaggaggaggcccggcagaaggcccgcgccgctcagctcaaggctgcccagtcggcttcgctcggtagcgccgccgccaaggcggcctacgccggtgcccttagcacggctgctgctcaggtgcgtctcgtcgatgggaacttgcagcaaggaatgctcgctgacgtctgtcggcttgctccagtcgaacgccgccgccagtgcttggtcaaccgtcggctctggaggcaaggctgtcgctggcgctgcccggcccggtgctgccgctcctgcgaccgctgctcgccctgccgctcctgctactactgcgccgctcaagccgagcgtcatcacgtcgatccagtcgtcgaacagcatgacccggtcctcgagctcggcctcgctcgacgaggcgacgccctcggccgacttccttgcctgggcccgcgtcgcgctcaggagcgtcactggtgtcaaccgtgagtggtcggagagcttagtgtcgattagaacggagcgctgaccgctctggcttctttcgtgcgatagtggacgagtttctccagatgctcctcacctttccgctcaacccggacccgatcgtgatggagatcatctccgactcggtctacgccaactcgtccacgctcgacggccggcgctttgcccaggagtttgtctcgaagcgcaaggccgacgccaaggcccagaaggctggcatcgtcgcccctgtcagcaagggcagctcgctcgccgacagttcgtccccctcctccccgtctgttggcctgcgccgaggctgatcgtgctctgtcactcacagtcgtcaaggcccagcccaaggcggctgacgccggttttggcgctttcaaggtcgtcaagaagaagggaaagaaggcgtagagggcggtgagcaaaaggacggcctgcgtcgagccgaattcgatgacctgccgtgctttcgtgctgcctcaaagtcgcgcccgcaactcaacgttcttgacttcgcctccacatgctgcccgtctcgatcaacacgtcgaccgtttgcagtggataagctcatttgggaagcgaggcaaagggccgactgggtgaggtagataggcgcctcaatcttgcctagtcctcgccggccgccagcttcgggcactttgtcgtcaggtcgcacgattggctgtccccctcgccgagggccaggctggtcccgggttcgcggaagaagacgagcgtgaggccgacgatggcgagcgtgagggcgaccgagaataagagggacgcctggtagcccttccagctggggacgacgacggcggcgtctgcgccggcgtgatccgaggctgtcgggaacgagacttggatggcggtggagatggccaggccgaccgagacgccgagctggagggcgctgttgaagacgccgcctgcgacgccagcgtgccggcgcgggaccgagaggacgagggcgacgttaatcgagacgaaggccaagctaagcgacgcagagccgagcgtcaagcccgggaaaaccagcggccagtacaaggccttggtcgatgcgaaggcgatcatgagcgctcctgccgaggcaccggctgcgccggcaacgatgcgcatcttgagcgtgaagcgctttggtagcgattgatggaagacgatgacgatgccgctagcgatgccgttcgggaggaggtaagccgccgttgcgatggccgaggtcgcatactcgcgctggtaggtgtcggcgataatcgtctggggcaggaaccaccagaactagcgatgaaagacgagtgagaagggtcagcgcggggtcggaaggaagtgtgcttgtcgaggcgggcactcacatagggcacactgcgagcggacgacgatcaggagagtttagtgtcagttggaaggttaagcagcgggcatgatacgacgagagaggacgtacagcgacaggatggtgagcagcgtaaagttggggatggaccacgtagttgggtcgatgagggcgtcgatcgggtcgatgagcgtctgccagtagaagaagatagggacgaggatcaagccgacgacgagtgggacgagggcgtcgaaccggccaaagccgtgggcgttgccgtccgaaagaccgtagatgatgcagacgatcgccgcggtgaggagggtgaggccgaggtagtccatcctgggctgccgacaaacgacggtggtggcggcggccggatgggcagggcaggaggtagcacagaccacggtggccgtctcctgaagctcgagctcgtcctcaatcgaggacgactgcttcgatcccgaagggatgaggacagcggcgaggatggctccaggcagaccgacggctgtgacgacgaaaaagatccagcgccagccggcgaggaggaggacggcgccgaggacgaggccgaggacattggcgatcgcacccgtgctgacgaagctgcgttgccagcggtacaacggtcagccgatgcttgtagcgtcgatacacggctgagacgtgaagcgactcacatcgagatggcccttgaccgctccttgtcgtttgggaacaggttgacgatcaagttcagcgcggccgggatcgtagcggatgcgccgatgccgctcattgcacgaaggacgatgacggtcgtcttgtcctgggcaaagccgatggcgagcgagaagatggcgacccaggtgaagccgaggacgaagctgtcggttggggggaggaaggtgatgagttagtccagggaccagagggatgaggaaaggaaggtcgaacgaacgtccacttagccgagtacatatcgctcaccctgcccgcagcgaggagaaaggctgcgagcgtgagcgtgtagctgttgatgagccaggccgactcggccggggcgagcttgaggtcgagggagatggtcgagacggcgatgatggttgccgaggagaggtagacgtcgaagaactgctcgagtcgaaatggtcagcgaccgagaccgacaaaaggacaagctcgaggctcgaacgagtgcaaggcgcacctgggcaaggctgaagacggccagaagagtgtaccgtcgaagaggcgagggcaggttgtcggccgcggggaggaggggcgctctaaggcgggtaaaaaggaagagtggtcagccgtgcccagctttaaggtggccgctgcagggtgcaaagtcgagaggcaggcgaagtagacgcaccctgatcggcactcggtcggagcgagcgagccctccctcgaggcgggcaaggctgccacgacctgccgaccctcgtacggcggcgcaggctgagatatgacggcggtggtgacgagcttcgaggtgaccttggcttcgatggcaatcgaagagggtggctgcgaggagtgggcgtcggatgacattgtagggtgagaggaggggcggcgcggagacgtgagagggttgggaggagggatgatggaaaaacaagtggctgccctgctcgctcgtctcttttgagcaaaggatgtcctcctgctacaaagagccggcccagggtcagtcagcataccgctcggtcgatacgagcctagaagccatcgggacggtgcgacgatgggcgacgacgatggacgacggcgatttgtggttcgagaagagacccctgctcagtcagcgcgcctgcggcgaggtcgcctggcgatcgattgggtgggctggaagccgttgaggccggtccctttgtcagcgggcaaggtgatgatgcgcaggaggagttgggtccgcgcgcgacgcgccggcgccatggcccggcgggcaagcaagagaggagaatgttcggatcatccgctcttccttgaggcttcagtcgccgtggagacgctcctgcttcttttctcgcccgtcatgggcaagagcggggaggcggcgccacccaggcagagcagcatcgtcggcgtgatagccagcgatggacgatctgtcagccgccgcgcctgaaccggggtggcctcctttcggtcaactcgtagcggcagaccgtcaacagaccggtaagcagtttcttgcaagcgctctaggagcaggagcccacttgagtctggaagagacatatgcagcaagccagtcgaaggacgaagacgggcagggtcagtcagcgggcgcgccgggccccgtcgacgcgactggcggcagcgccctcttgacctaccgttcgacgaggtttgtctgcctcaacgacggtctggccggcaggacatcctctcgccgtgctggacctgctcggtttggcctcgtctcggaagtccgggttagggtcggagggcagccggctcatgctgcgcggtctccgagctcgacccttcgtcccagcgcgtcgttctcgccatccaacgtcaacaacccctccgccgccgccacttcacacagcgaacttctccggatgatggacgaccaagagcaggctccgccgaccgagcgcgagctcctgtcgaccgtctgggtcttccccgagttcctccaggttcgttcgagagcgcctgccggcggcatcctcgagctcgtgctcccgacctgcgaggtgctgatctcactcggatctgcttaccctgcccgcttcaggctgtcggtccgctgcacgagggcaatgtgtacgccgtttcaacgcccgcaaacgcatcccctcgcgttggccatcagctcttgctcgagctcactgcctgacacctgctcgtccctccccctccgcccccctggcttcctgtcccgcaggctcgaatacttctcgcactcgcccttctttgaccgccagtcgaccaaccagcaactcaaaatgcagacgatccacaccgggcagccggtcttggacgaggctgaggagctcaagtgcggtcccaagcacgctcggtcgcgtcgcctgcgtcaagcctgagggctgagcgacgtgctcacgaccgagcctctcgcgagggtccttcgtgtacgacatggggagactaatcctgctataatttcttccgttctgccagacgcttcaccggcaccgaatttgcgctcgttcacgcccggccgccagcactcttcctcatccacaagcgcgagcggcacgaccccgatcatagtgcgtccacataggctcagctcccttagaagccggccaacgacagcttgtaaggagcgctactgactgacatgctgtctgacgtcctttcttcaagcgacgacgctcgccacctacccggtcatcaacaacaatgtctacctctcgccgacactcgacggcgtgctctcctcgcgactcgttcgtccttctcgcacccgctcgctctgctctcctgctcccaccaagactgatcgcatcccatctgcttcagacgacagccgtcgacgctttgcatgcttcgatgaacacgctccgcgaccggctcgcaaaggaggcgagcttcgaccctcgaggcgagagccaggtcgtcctcacacggcaggcgacggtcccaacgacaacagcagcggactcggcggccgatccagcggtatcaacagcagcaccagcgacgacggccgttaacatccagccttcattcaccgccctccgctcagcgctcgccgtcctacccacgctcaaccgccagtcgtcgacagcccctccctcactggccgtcacgtccgtcgtcgatctcgcgcgcctcggcggctctggcgcgagcgtcggcgggggctcgactcgcggcgccgcgtcgaatgcagggacgccgacgcccggcgggcctgtgacggggcggagcggcaacggcatggtgccgacgccgccgcctacgacgggcaagtctgccggcggcgggacagggacgcctggctcggcgggaccctcggggctgggtacgggcggcaaggggaagaagaagaaacgaaagctcgacggggagagcggagggaagaaagaggacggcgggacgagctcgcccttcacgacgacgccggtcggcgtctgagacgagccggactgacgtcgtccaaagaccctcggtcccactcgcttctcgctcacttaggagagcctgcattcaatcgccggccgtcgttactcggccctggctttcgccctcagtcggccggcacctcagcgagttgaccgtcccaagacgccggccccgcactacccccgccaccagtaacctcacctacgccgccgccgaccccggctcataccacgagggctcacgagacctaagcttaagagtcagcccgccttaagctcagggggcagcctgtgcgcctggacgacctgtggctggcctaaggcgatgacatattgcagatgcagatccgaagtgatggaggaggcaaggatggtatggatggtgtgcaagggagagggaatggtgcaaggtacgaagcaaaggggtatgcaggcgggcaaagtgcggaagctggagggggcagtggacatgtgcaaagagggacgggtgagggatggaaagacgtcgtctacacaaagccggcagaggccaggttctgcaaagattgcggtcggatttgaaggatgtcagcgagcagaaggaggggtgtcggatgaaagagaagtgctaacctggttcaggatcgtatcctggacggcgtgcatgacaaacttgactggagaaaagggaaaaggggagcatcttgtcagcatttgctcatcagctagcctgcaaaggtcaaccgcaaggtggctcaccctgctgcgtgtcggtggcggtcgtctggtgcgcgtacaccctgtagagcgaaaagggagggttagctcgacgcgacgaggactagcacgactcgggacgcacttgttccgcgtcttgttgagcgaggtgaacttgagggcgaggaagtcgagcgcttcgttgatcgagtcgccctggctgcagagaaaaactagtcagtctcgacgacactcggccgtccgttagcaacgaaggacgtacaactccgggaagaaggtcgaaagcggctcccgtgcgagcttcgcgcgtgccaggtcaatcttgttgaaaaacacgatccgtgtcgagctttcgaaccagcgcgagttgatgactgagtcaaagaggatctgggcctcgacgagccggttgacctcttcgtcctcgtagaggctctggtcgtactcgctgatggcgacctgcagacgcgaaggaggagtgtcagccccggctcaagagcagcaaggaggcgacaggaacgcacgatgaagatgagagcgttgacgtccgagaagcagctggaagggggagcggtccatgagtttgagatcagccctgggcagtgaggggctgacgtgctgcctcaggcgacgtactggatccacttcttgcgctccgagcgctgaccgccgacgtcaaagatgcggaagctgccggcgagagcgagacaaggaggtcagtcgtcaggacgagaatgtcgacagcgccctcggctactcacgtcgtctcgccgacgaggaaggacgactccatgatgccggtcgacttgacgcgcgaccgtagaatatcgtcgtcagagggcgagtaggccgttgtcgacgtccggtcgagggcgtcaaagaagctgcgtcgacgaagcgcgcttcgtcagagcaggttcaagagcgagagagcgggaaggagataacgcactagccggccgagtcgttcagctgtaggcgcgaccgcttgtcaaacgcctcgcggatgccctcgtcggcccaaaggtgctggatcgcggcggccaggtctcgtggcaggacgtcgccctcaatttgaggcggggcgctcatgatggcttcggcgtgatgctggcagtcgggctcaagcgggatagccatcgaggcggcgccgtcgacaagcacgctatgcgagcggggaaaggggggagtcagcgaggggccaagagacacagaaggaaggaagtctttcgacgcaccgcatcgactggacggtgttgctccagacgacttcgcggaagttgtagcgctcctcgctgctccacggctgctggtgtatgagccgcatctgcttgacgatggtcgacttgcccgattcgcccgcgccgagaagaagcatctggcagagaggcgggcaaggtcaggagcaagccagaggaggtttcctttgatgtcccgacgcaccttgacctcgctccgggccagtcgcgcgtcctccttcagctgacgctcgatagagtcggagcgctgcttggcgccgccgtcctcgttcatgggtgatgatgcgccgcagccctagcaaaagggtcggccgtcagctagcgggcagatggcgaactgaagttctcgacgacggaccatgatgatcgtgctggaaggatggaagggtaagaagggaaggaaaggtcgaggcagagctgcgaagtcgacctgtcagctcgacgtggtcacaacggtgaccgaggacggaggtggagggcgcgaggggacacacaaagaagcacaggggcggctagatgagctgaggaaggccaagacctcgtcagtacgggctcgggtggaagaaagctggcgggagcggcgtcggcgacctcacgagctgaggcggaaggtgggcgtcgacgggagaagaagaggaaggtggtcgtcgtcggctggctccggtcttttagccggagacttgtcgatccagtctgggctcgtgcgtgcgggttcagttgtcgtcggtcgttgacgacgccccttgtcgagtggcctcctgacaggagagctcggagggacggtcgtgaaaaacgggcgcggggccccgtgcgacaggagaacaaaagggaaaaggggcaggcgcggtctcacgtgtcggccgcgcgagcgataacaggctaggcgcctcggctcgtttgttgacacagactcgctcactgtcgaggcagccgctgatgagcaggcactgagagagtcgtcaataggtcatggcaagtcgtgtttggtaagaggaagttgcaggttgcggtgcgaagcaagtaaggcagacaggttgcgagagagagagagagagaagatgcgatgagaccggcgtaaatgggagcggacccggtcggccggccggcgtgctgctcgctcagaagccacgcgaaggaagctcgtcgaaggagctctttcggggccgggcggaacgcgcgaccggtacgcaagcgcggctgatgacggcgctggaggagcaggtggggagaagagagcccggggggtctcgagtatggcggcgacagcgatctcacgcaagattgcgctctgacaggacgacgggccgccgcttgttggtcgtccgatgcggtgtgacgcgctcttggacgccgttggctgcccagaggagcgtgctgcgaagccaagcccgagagatgtcagcgagattgagacagcgagacacgaggagacggcggtgcgcaccggtaggccggcacctcgaagcgcccttgctggcggtgcatcttctgcctttcctcggccttcttgaggtcgtgtttgagctgcgagggaggaaggagggtcgtcagatcaagcggcagctcctagacgcaaacgctcggctgacgtacggtgtggctcatttcgccgttgcgctcagcctcagccttccgctcagccagcagggcctggccctcgaacgtgtcccaggcctcgagcgcatgccgccggccttgcgagcccgccggtccgttggccgggctccggtagtggcatggcccgagccctggcttgtgcacgaggacgatcttgatctggccgacgacctccatctcgtgcgtcttgcgggtaaagtcgttgatgtactaggagtgtcggacgacaggcggtcagctcgtgtcgcctcatgcgggcgtggggtgcagactgacgttttgcttcagctgcttgagatccttggcccggtagattggcagcgagagctcttgctcctcatcgtcgacgacctcgtgaagccagagcgcggcaagcgcgacaaaatttgagtgggtgagatgcaagccgtgaaactcgaacgtgagggcctgcgaggagaggggcgtcagcggggatggggaagggacgagagtttggccggacgcaccgcctgctggcgaaagtaaacgggtagcttgattgggtcctcgttccagacgagctgcgtgccgtcctcttcggcattcttgcgcttgagcgtgtgcgtgccgtcggcagtcgtcaggacgattttgctaaagtcgccgacgagctcatggtgtgccgggtcgatgtcgaccatgacgggcgaggtgatcatgacgacgccggtctcccagccttgcgtgccgcgcgggaggtcgacgccgacagagcggaagaggagcgagatgcgggcgagacctgaggcgagagccgagcgtaaccgtcagcaggcggcgtgagccaagcagatggctgtgcgacgcaccgaaaccgacgccgcgctcgagctggcagaggagcaggaggttagctcgtgagggcgcagccagtctctcgaggaagaagcgactgacagggtagtcgcgtgtcacctcgcacgcatcgctgaggatgtctttcagcggcaggttgacgatgctgcgaacgagggcgagagggtcagccagcggcccgagagcgctcagactgccgctgcagacaaaccccaagatcggatcccgctcgcgaagtgtgctgctccggacgacgacgcgtacgaccgccgtgttgaagttgcgcacaaacttctcggtgccggcctcgatgatgcagtcgttcgtccgcttcttgaccctggagcggccgcgcgagaggaaggggtcagcgcagggagagagggagacgcgatggcggaccgcaccgagtctggtagagaagctgatcgttgtagaggatctctgcgtaaggcgagggcagatcgatatctgcgaggtcgtccgtgtcctggccagtgtcgccctcggacccgcccgagccctcgaggtgcgccttctcaagcctgctcaggccatggacgatgaccgagaggatgccggacggatacgccgggtcaggtggcgtccgcagcggcgtcgcaggcggcggcgggccgtccttcgcagccgggctcgggccgatgtcgcccggccgcatctccatctcggtcagcgtcttggacggcgtgatatttgagaggtcgggcgcggcttggagctctgggttcagtgggatctttggccagtacgagtaggaccagttgagcttgccttgcgatttgccgccgtctggggcgtcgggcagaatcagcgggcgcgggcggcagcaggctcagacgagcagggacgcaccctcgaagccttggacctcgtcgtttcggcggatcgtttcgcccggcttctcgatcaggtccttgaccgggatccgaactgagcggggggttgagcgggtcagcgcaagccggcgcagccgacgaagccaaagggacgtactgcggccgatgaggtcgtccttcgtatgcttgtccttgtcccagagcatgagcaggagcgactcttcattcttgatctcctcgctcgtcaggaggatcggaaacgtctcttcaaaaacggggttcaggtcctggaggatgatgcgcgtcgagtactcggccttgccaaacttcgagtaggagaagctgcgggcggagcgacgcaaacggactgaaggcgtcagctgcagtgccagtgatggcctcgcgacaggaggtcgctgacgtacacgatgtaagggtccgaggagcccgacctgtcttggcccgacaagtcctcggcatggtgaatcgtgatgatgaagacgccggccgcgcgcgtatctgccatcagccaatcagtcagcctcgatccaaccccgagacagcagaatgaacgacgacgacgcacctccgatcgccgcctcaccgagaatgtcctccatgttgagcgtcattgacttgggtgcggtaaactctgcggtcccggccgagatggcctccttgacgaatttcgagatgagcggcaggtcgaggacgttgggcaagacgcgcgacattgggatggccgagacgcggaagccgggctgaaggagcggcagtcggcgtcagcgatgatttattgacgagtaaggacgaaagtggcgacgcacgacgcccatgaaagagactgcgggccgtcgctcaacctctctggcgagatcgggaccaaggcggccgactcaggctgccaggtcgcctgcacgggcgacaagtcgcagatgtgtggcggctcgtaccggctccagctctacaagtcggcgtctgcgacaatgtcgtcctccactgccccttccagatccagcagctcggcggccgtcgcctcgccaacggctaagtggacgttctcgcactgcgcaactgactatccgtgggcgccagaaggcggccgggctctcacgggcgccggccctcttgtcgctccggccgggtcgctgggcatgacaaacgtcctctgtcagagcatgtgcgaggcccgcggcttcacaatggccggcaccgagtatcggacggagtgctggtgcggaaagtgagtttttcggttgtccctcgcccttatgaagtgccgcaatcgactgacaaagccgcgtcgaccagcttcctcgacaacggcaacggtcgcgctgcgccggcgtccgactgcctcgagccttgtgctggtgatcagtcgcaaaagtgtggcggcggctggcggctgtcaatctacacgtcgccgaagctcaagacgtggtcgctcacgcggagccatgagggcaacaccttctttgacggctggaactggtaccacgacgccgacccgacgcacgtacgtccgtgcccctcgagcccggtggcgcttctttcgactcgaagctaatctttcctatctgctcagggctttgtcgactacctcgattggccggaagcctttggtctcgggctggcggtaaatctgcttgctcacctcgaccgcttttcatgagcttaccctcggttctctcgcatcgatcgaccgcagagcgtcaattcagccggccgcgccgtcatgaaggtcgaagggacgccagtcgtcaccgacatcggccgcaagtcgatccgcatctcaaccagctggagcttcaacacgggctctctcctcatcatggacgccacgcacatgcccgtcggctgcggcacttggccagcctggtggacgctcggcacctcaacctactggcccttgtccggagagatcgacattttggaaagcgcgtttctctgccgtctgcgctcatgctgccccgtctgcggttggttgacgctcgtgctcgaacccaggcacccacttttcgactaacaacctgcaatccattcacaccggccctggctgctcgtacgtctctcgtgaggctgtacatgcattaatagagatactgagcaggcttccctacccgattctcagcatcccggacacttttggcggaagcggccgcctcgtcggcgcaaacaactgcgactcgtacgccgtcagtcgcatcgcgcggcaccgggcagagaccgccggctcatcgcatcgctgacgacccactcgcgcatgctgactggcagaccggcaacaccggctgcggcattgacggcagccagcccaacaactacggcgtgcctttcaacatcaacggcggcggcgtttacgccatgttctggaccgaggcccacatcgagatcttcttcttcccgcgcaacgcgatcccggccgacattggcgccaaagcgcccaagcccgactcgggcggctggggccagcccgtcgcgaggtgcgtcgtgcgcctgagtgtctctgcaaggctgtccgggccgctaacctgacccccttccgctctcgtcgccgcagatggcccgtcacgcagtgtgggccgctctccaagttcttcaaggaccacgtcggcatcttcgacacgaccttctgtgcgtcgccctgcggaggcgggaccttgtcggctcggcgatcaaagctgacctgtcggctctctttctcacccgtcgcaggcggcgactgggccgccaacgactggagttcgcaaggctcacagtcagcctcgtgcgctgctctcaccggctactcgacgtgccaaggtgcgtgtcgacctctgactggcagctcccctcgagacccggccctgaccgcccgtctgcttgcctcagcctacgtcaagaatcgcggcggcgacttcggcgaggccttctgggagatcaactacgtccggctctacaactagactaagagcgcctctcacctgctctcaccaccctttctctctctctgtctctttctcatctcgtccatgtcgcgtctttgtctcgagattcccgtcgtccgctcggatcgtcatgccttctcctcttcggtcagcggccgatggtgcaagtttcgagtgtcatgtctatcaatagagcggctcaacggaagctcaacgtcgccttgacgtccgccctgcaacggctcgtcgctccctccagctccagtagtcgctgctgctggctgctgcgcctgcccagaaggacgcgcctgcagtcgacgcgtcgagccaggtcggctcctctcctcgctcggccacctgactctcgagtccaaagcctcggcaacgccccccgacttcttcccgtcggccatgtcttccccgcctgcgtctcctggagctctctcggccgccgcagccgcccttgcccacctctttgactcgccgacgcctccccggccgaccgccggccgtggccgacccggcaacagcgccctcttcctcaactcgccgacgtcgtccgccggcggagggtcgccctatacaacatcaaggcagcaggcgaacggccgcgccgagctgcctccacgcgcgccgggcacggtaatgggcgagggagcgcctggccctgggccctcgaccagcagccggacagacgcgctcgccctgtttgacggcgtcgacctcgacgacgccgcactcgacgccgagatcaatggcacggccctgggtgccggagatgacgggctcgatggcacagtggcaacctcgctcggtaagcgggtcgtgccaaagatcgacgaggcgcggtgcgtctgcgagggcgagagctgctgcgtgcgaccggagactgacgcgcgcgagcgtctcctcccagcttgctcggcgatcagggcatcacgaccctcgtcaagcgggcaaagacgatgacgttcaacggcaaaggccgcgaggtgggtcgcatcctgctgttctgccgagaggtcctcacgagcttggcgctgacgctcgcgcaccgactgactgcccgcccgacccaggccgaggacctcggcaacctgctcgaccactaccacgtctgggcgcataccctctttccaaagtccaagttcaaagacacgatccggatggtcgagaaggtgtgcaagaagcggtcgatgacggtgcgtctcttgcgagcgtcaggagggtaggcgcctcggtgttgacgaaaccccttgctgccgccgctcagggttccattacgcgcttcaagcttgagtttgacccgccggcgcctgcgtcgccgtctccgccaccggaagcgaggatgggcgactcgcccttgcccgaagtcacgttcgcctcttcgcgcgtccgcggctctcgctcggcctcgcctacaggccggcgaccactctttccccgcggcggctccgacaacggcaacgacgacgacggtcggcacgttccgggacgagcagaggccgtcgcccgagcgcttgctgcgacggccgccagcgttggagccgacgactttgacatggacgacctgatccggcaggccgacgaggacgcgcgcgtcgctgaggccgagatggcgctcgggtcgaatgcgtcgagaccgcgaaacgactccaaggggcgagagccagcggcccgagccgccaaacataacgatgacgacgacgacgacgacgagatggacattgactgggccgagctcgacgccatcgacgcagagatcgctgccggcgccgggcgttcacatccggcagagacagccgccgccgccgccgaacgactactggcgctgccgcagacgaaggcgtccggcgtcgggacggacggggacgccgaggactgggacgcgttcgatgcaatgaatggctaactgccagggcttagtgaatgtctcggatacgatccgctccctgtcttcctccccctgccgagaatactggagggcttcacatgtagtcaagatagcgggttcggggtctcctagatgcgggcgaagagcgttttccagacgtcggcgttgcgttggtcgataccctccaggtacttgtcccacgacaggtcacggagctcgacgggtccgcgaggcacggctttcgccgggtccaagccaagccggtattgccggatggcctcgatcgggtccatcgagttgggatgcagcaggagagccgggccggagagatagttgtacttctcactgatggacgttccgcagaggacgggaatctcggcgatcaaggctgcgccgatcgatgacgaggccatgtcccacaagtacccgccgtgcgagaaggccggcatgagcgcgtcctgtacagcaagagcgacagcccatcagcgtcaggccgcgagcccgggaaggaacctgcgactgaccatctcagcgagcccgctgtaaaattgctcgtactgctgaccctggtcgatcaggacgatgcctgccatttccggaggaatgtcgagcgcctcctcggcctggcccaaaagatgaagctcaaacggttcgggcgcgcccttcgtgcccgtaggtcggaggacccggccctcgggttggtcatctgaccagctgtagccccattcggccgggttcttgagcagctgggcatgcagcgagcggatgactgtggcatagtcgcgccgataggaggcaatgttgccctggatgccgaccttggcgggaaagtggcgcggcttcttcttctcgctatgcgtgcgatgggcggcctcgactgggaaggtctaaatatgggaaaggccggcgcagagtcagcttcttcggcattggcgtgattcttcgagagacgagcgggcagccgaaccggtacaaactccgtgacctcgaccttgtcccacgcagtgcccataccggcctcgttttcggtagccatacgagtgagcgactcgcggacaaagcgtccgacgtgatccgatagtgttatgagcgagagtcggccggtgtcggcgagcttgctgtagcgatcgttgaaattgtgagggtccgatccccagtgcgtcacgcagccgacgtggactttcgtcctcgggtcgagcaacgtcgggagcagcgcctcgagatggagcgcacctgaagtcgcagacgtcagccgatgcgcagagtcctgcgaggcccggataggcgagcgtacaggtgctgaggatcagaatgtcaacctcgttctcgacgaccaccctctcgagaatcgccttgtcgtccgactcccagctcggatccggccagaaacccttgacggcgtcgaggaagccaaagcggaagccgttcttccgaaacaggcgaggctcgatgccggccttcttgagcgagtagacgagcgcgccggcgacctcgtcgtgaaagtcggcgccctcccagatgcctaaccgcttgccctgccagaggttggcttggccgctcggggcgctgactgagctaagcaatgtctgctcctggggagcttctgcttccggcagcggttcggccggagggcgctcgctgtcttctggcagcggttcggctggagagcgctcgctgccgcgaaggatcgtgttccaaggcacgctcccggcgccagagccgccagcccaaggcgagagtcgcagcagcagcgcgccgaaaagtaggagggagaggcagagtctaaagcgatgccgccgaggcagtctgcgacgccaggtcgccgagggcccgttcatggcggcaggaggtctgaaagcgatggcgtgtcgaggaaggaggtggaggccagagatcgcaaaagtagtcgcgggaaagggttgacggcgaaaagggctgctgctcggctgcgatacaccgcgacgacggacgcaatttcggagacgcgccgcggaactgccccgtcagtcggcacctccattcgcaccagtacctcgacagtcttcgagcattctcatcagcacgtgctaactgccgactcgcccctagtcccgccggcgacgcggccgaccgagggtccagccgcatctttctcgcggccgctcgctcgctcggccgccccgtcggcacaaaagagaagcctgacgacgagcggcgagagcgtcgcgcccggggcctcgtctttgagaatgcgttaatgccgtacgtcaaggctggcgtgcggtcgggcatgcacgctgcggccctgctggcacactgaagtcaagcgtcgctccagcagctgaccccgtcgagcccgggctggatcccggatcaggagctgcgcgagctgcacccgtcggctgacagcaaagggcgctcgccaggtcctgacggtgctcgccgccggagcgcaatgaacctacgagacgtgaccgacgagatttcacgaggccagacgttccggttcgtagaccattgtgaatcagatccgaaagacaggatgttaagaagccggcctctaagactcgggcgcgtcttcgcttagatacgaaacaaagccgccgtgccagtactgtttgacgatgcgccgccgctgatcagcaacctgatctcgagctaagggggtggcagagggatgtacctcggctcgccgcgcattgagcatcgacactgcaagacagccaaaagctcggttagaaaggtctggccgatcagcggcaataaagctctgggactgactggtcgacttggccgtgccaatgacggcaatgcccatagacagctgcgagggcacaagcggttcggagggaagcgcacatcagcaatacgcgcttggtcaaagtcaagtcaggacagacggacgaacgaggacattgtccatcagcattggatacctgccaaccgaaagacggcgcgtcagccttccaacgagcccggagagctgcagccagcagaagcccaaagctcggatcaagaatgcaacgcaccagtcaccgtaatcgtgccgcatcctgagttcctcctcatcggtgatgcgcttccaaccaagctcttgcgccgcctcgagaaattcccggtcgcgctcgttggtcgtgaaaatgacttcagcgtgcgcgatccctcgctcgtcgaacagccgcttgcgcacgttggcaacctcgtgagcaaaggctgggagggagaagcacgtcttgcccgggtcggcctggcaacgcggcagaaagtcgcctacgcgcggaagattcgcgaccagagtggttgagatcagccagagggatcggtattgttatgggagattgaaactgagcgagacggaccgtgacggatgtgaacgctgataaagtggggcaagggcgcgccctcttcgagatcaaacaggcgcctaatgacatcctgcccgcgggaggcgacagttgggtgccagtatatgtgctgaccgaccgactcccagggtccgagagcgccgtccccatgccgaggcgcctcgagccggtcctgggcgttgagcttcttgggcggggtgtgccaagagtcccacatgccgagctcgacgctgatggccgagtgaaagactgcagagtgggcgtgagagcatgcgtcagatgggcagctgtgaagggccaagacgagcagatggaaacgcaacggttgtcctgcaggaggccaaaggcgggcgggcagatgaggcgtcagcatttatgaaggcagaaagccgtctcttcaaactcacgtggcacgcgatccactcgctgggggcgaggtcgcccttgtcgttggccgacacagactctaacgccttttcattgaagccctcggccggatgggcggcaaggacctcactcatgccatcaaaaagcgggacctggttgtagtagccttgctgcatggccacaggagggaggacggtgaggtcggggcctgtctagccgggaacaagtcgaccgagccagtcagttcgtagtcgtctttcggcagtggcgagttgccgcttcgtgcgaagcacgtacggagccgcagccggtcaagcgggttctgatacgagatcctcgactctccccagcaaccgagcgcgacgagctcgcgttcacgatcgacgcggccaccgccgccaggcagcctctcgaccccagtctcgcccatcggacggacgccgccgtcgtcttgcggccaacctcggccgccggcgcttccgtcccggttgatctcgaggatctcgccaatgtcgatcaagccgcgaagcgagcggccgagcggcgtcgtctggagtgcgtcgaagagcctaggcaggtcgaagatggcgtcgaaggccatgtgagggaggtgaggccagacgagcggaccgaggcggtcgacccggccaaagtagaagggcaagatgggcacccggtcagtcaggagggcgagatggatagctgcgaggagagtcgcgcggacgagatcagcaagcgaggacccggcggcactatgggagcagggcgggaccgactgtggacggcgcccataaactggttcgagaagccttcgctctggccggacaggatatatcgttcgtcgggcaggagtcgatctgcgccggaccaagcagaggcagaggagtggagaggcggtttagctgcgcccttctcgtggcgagacgcttcgcttatcggggtgagagctgggacagaccggtgaagttccagcgctcgtggccaagctcgtcgtactccttcctgccctgaaggacggccgtcgtcgcccgagccgggtcgagcatctcactcgagctgctgctaccaccgattggcgaatgatccgctacccagcgggtgagctggtcgacgcctccgctggggtccgacaggacgacgagcgtgccggtcacgagagcgacgaggacgacacagacgacggctcggtaaaccagccgcgagccgaaccggagggccaccggcagtcgatatggcattggatgctcggccggaagagagcggtgggaagacgagtttaaagcggctcctgtcgaaaccaggcgggggcgaagctggtcggcgcgtcgatgagagggggagcgagcagaagttaagtcgaggaaaacgacaggcgccgatcacgcccggcgtgacgcggagtaacgtccgaggtcgacgcgtcgagccaggtcggctcctctcctcgctcggccacctgactctcgagtccaaagcctcggcaacgccccccgacttcttcccgtcggccatgtcttccccgcctgcgtctcctggagctctctcggccgccgcagccgcccttgcccacctctttgactcgccgacgcctccccggccgaccgccggccgtggccgacccggcaacagcgccctcttcctcaactcgccgacgtcgtccgccggcggagggtcgccctatacaacatcaaggcagcaggcgaacggccgcgccgagctgcctccacgcgcgccgggcacggtaatgggcgagggagcgcctggccctgggccctcgaccagcagccggacagacgcgctcgccctgtttgacggcgtcgacctcgacgacgccgcactcgacgccgagatcaatggcacggccctgggtgccggagatgacgggctcgatggcacagtggcaacctcgctcggtaagcgggtcgtgccaaagatcgacgaggcgcggtgcgtctgcgagggcgagagctgctgcgtgcgaccggagactgacgcgcgcgagcgtctcctcccagcttgctcggcgatcagggcatcacgaccctcgtcaagcgggcaaagacgatgacgttcaacggcaaaggccgcgaggtgggtcgcatcctgctgttctgccgagaggtcctcacgagcttggcgctgacgctcgcgcaccgactgactgcccgcccgacccaggccgaggacctcggcaacctgctcgaccactaccacgtctgggcgcataccctctttccaaagtccaagttcaaagacacgatccggatggtcgagaaggtgtgcaagaagcggtcgatgacggtgcgtctcttgcgagcgtcaggagggtaggcgcctcggtgttgacgaaaccccttgctgccgccgctcagggttccattacgcgcttcaagcttgagtttgacccgccggcgcctgcgtcgccgtctccgccaccggaagcgaggatgggcgactcgcccttgcccgaagtcacgttcgcctcttcgcgcgtccgcggctctcgctcggcctcgcctacaggccggcgaccactctttccccgcggcggctccgacaacggcaacgacgacgacggtcggcacgttccgggacgagcagaggccgtcgcccgagcgcttgctgcgacggccgccagcgttggagccgacgactttgacatggacgacctgatccggcaggccgacgaggacgcgcgcgtcgctgaggccgagatggcgctcgggtcgaatgcgtcgagaccgcgaaacgactccaaggggcgagagccagcggcccgagccgccaaacataacgatgacgacgacgacgacgacgagatggacattgactgggccgagctcgacgccatcgacgcagagatcgctgccggcgccgggcgttcacatccggcagagacagccgccgccgccgccgaacgactactggcgctgccgcagacgaaggcgtccggcgtcgggacggacggggacgccgaggactgggacgcgttcgatgcaatgaatggcgagctgatgtcctgcatgagaggctgagcgcagagctttgggctgaggggtcgcctgggccgggatgcgtctgccccgagccacgcgggccgcacgccaggcggcctgcgcgtgcctgctgctgcgaagaagacgcgtcgacgacaacaagttgctgcttcaacccgatcccctccgctctcgcgcccgtgccgctgcagccatggtcgttctgcacaaggtcaggccgcagctggtcatcccgttgatcgtcggctccagcgtggtcatcgtcctccttgcgctcggtcgacaggacgtctggacgaccggtacgccgcccgtcgtctgccccgagcccgctgcggtcgccgcctgtccagcgatcgtcctctgcgacccggtagcggccaatgcaccgcctcctgcccccgccgctcctgtcggcgccgcgaagccggccgtcgggcatggatcgagtggccctgtcaagctcgttcctccctcaacggagggatcgttggctgctgagccggtcactgacagtcgggaagacgcctgctggtgaatcatcggcaatctcctgtcgggtcgacatccgtcgccatagctgacgacctcgcgcgcccgacccaccaggcgcttggaagcgtccgataccattctgagtctgccggcggagcttccgttcgaagtccagctctgtgcaccagcgcagtcaggaaccggacgctcggccttcattctcgtcagacgcaccaagccggtcgagaagtcgccctcggccttcgggaccgttgaccgccaaggcctggcttgggccgcaaagcaagtgccagacacgtactacgtccactgggagtacgccggcggcgtcggcggcatcgagacggacgcagcctacctcccggccgagacggctcagagttcgacctcggtccggccggcgacggtttcgaggttgcacacagcggcgaacttgtgctcaaattccactggggctatcactgagccgctgccgtctgccggtgagcactgccggatcgcgggtgacccggcttgccttcgatcgacggcagcgattaatcctacgcctacctcttgccgctcttccccaagcgagccaacattctgctctagcctcatcagaccgagattaccacgtcgcccttttccattgccggcgccaagttgccgaaaccgagcgaacttcccagcctcggccaggagtctccgctcatcccgtccttgctcgcggatcgagccgctggccggccgtttcgtcgccaccggctgtggcgtccaggacatctctgtcgaccgcgagctgcagtatacgtttgtgcccgacggctgcaaacttgtcgatgctccactgcctcgggtcgcaggcctggcgcccgagggtgtggcagccgtgccatgcagccctttgagcagccactggaacatcgagagcgcgagatcctcttccagggagaatctcacgtccgtcagtaaagggctcccccgggctcgtgtcgattcttggccaagcagctgactctagtgctggttaccaggcaatattgccggagtcttgatccgggccctctcagaagacagcgaccatgccagtcggtcggtgtcgcgcgtatcgacactgccttcaccgctgaaagcccctcgaccccctctctaggacctgtttgcggcgctaggcccaaagtatgagccgccggccatgaccctgaacaaggtgacgatcacaaccaatgttccgtatctctcatccctccaaagccggtgacgacggacggctgaccttgtgccgagaccatctgcagatggacccgtggctcgaaggggcgtgcgagaagtatctcgggcacgactcgatcgtcctctcgaccgtctgtccagctgacgctctctctgctcgtcactcactgacgctttactcgctgttctagggtcagcactttctgtgcggcgcgatgccaaacgagaccaggtacatcattaacctggagcgttacgatcatctgtacacgccgatcgagactaccagtttcgtggcgggcagagtcgagttcatcaacaagtgcttcaccgatgccgggggagcagagcctcggtgcgtaaagtccgtcgctcggatgggaaagaccgcctccggctcacgccctcacccttacatcgctcggtctgtccgatttgccgggctcgcaaaacgctccaaggtgcggccagccaccagtctcatcgttctctctaccccgtccaaagactcttggggccatcaggacaatctcatcgactcgagggccaacatccgcctcccgtcctaccgcgatcacctgttcgctgcccttcagccgcacttcttaacgtccggctgattgaccaatacgagcttaacctgccttggatccacgagtcctcggaccacgttcacgtgtcctcgctcgatgtggggcgagcgactcacgctgagagctgatgatgcctggccctttgacctgccagctgtaccaatccctctgcgagctgtcgtcacccaggtcgtttaccaactcgacctcgatccgatcgccatagatgacgagaaggtcgagcttaggggcatctgacggctgagccaccctttgcactctgaccgcctccacgctccaatcccatctagaaaaaatcactttgtcgccttgatttctgctggttgtttgtgcttcatgtcgttggcccttagctagtttgccctcagctagccggcaagcaaaggcacaagagaaagcccatatgtcaatcgtcagggatgacggtacgtcgtcgcctcgcggtcgtcggcgagcgcgcgcgcatactcgagcagggcgagcaggtggtacgcctgcatgctctcccagctccagtcctcaaggacgaactgccggccgttctcgccgatcgcctgcgcaaggcctggccgagccttaaaaaaggcgacgaggtcaaagagatccgagtaagagttttgaagcggaatgtagtggtagaaggggatgagcgcgtccgagaaccactgcgaatagtgacaaaagggcgtcagcaggcgtcagagaaggatcttctaggccagcgggagctgccgcacttcgggaaagacggtcgctttgaagacgacgctccctccgagaaggagccgccggaagcgcgagctccagccgctgtcaacaggagagtaaaataaaccagtcagccgctgctcctccccgagctgcaagcgaaaggcccgcggctgactttccgtcgacgtcgaccacaaactggtacttggacgcttcggcaggatcacttcgggcagagaacgccacttcggcccgcatctcatcgcacgtgccgtccctgcgaaaagcaaaaaaggcgcagccgaagtcagcgataggtcgcgagggaagcaacagctcgagcagggcaccgacttcagctcgcactgctctgctccgaccatctcgatgtcgagaagctcctttgcgagctgcccggtccgagccagctctggcgaccagccgcggccgtctgtggtcggcatgaggatcggaacgagcacatttgcctccttgtccttcgggtgcgagacgtggtagagccggaagcgctgagaggctcgccagtcaatcttcttgctcccgtgcacccctgtcaaggattgacggctcggtctcgtcagcgaggcgatgccgagagagagaatggagagctcgcacctgtgccttgacctcgccagtagaccttggagacagtcttctcctgccagggcacaaaggggacttccgaccggacgccgtccatcggcacgccgaacagatcggagttgtgcgcgctacggcagtacgagaacattggagtaaaaacgtcctggagaagcaagagagagcggtcagctcctcgaggcttcgcgaagatcctccgaacggacgacccacaggcaatgggcggcctgcgatgaacatggaatgctgttcgagaagctcgggcatgaggcagtagtccatcgcctgaaagacgcgtggcgcacgttgtcagtgcaggcgctcgctctcgcccgggcaaaggcaggagccgaccttggcgtggtcccagatgaagctcgtgcggcgatcggtctccgagacggccgattgcaggacgtgatcgcgacttaggcgaccgacaggcgaatcgggactacaggcccaagagtagcccatggttccgcgctgattgtcctcgaacgctgcgcgctccttctcgggccacactgccgcagacagacgagtgagttcgagtcggtcattacagcaggagagaagagcgcgtcctcgctagacgcacgttgaccgcgcgatccgtagtgcgtcgaggcgttgaacactcggtggtgggcgatctgccgcggaaggtcgtctgcaagagtgcgagggcggtcaaggtcagctctcagcatatttaatgtagctgagacggtaactctgcgagaggcacagacgcaccgacgttgaagtacaccttgacgtcgggaatgatcgccgcgagcggcgacagaagctggacgaggtcgcgtgcgcgaccagacgcagcctgcgtgccgtcaacggcggcgagctcgccgtcactttgagcccgacacaaacggcgtcagctcagatccaagccggtaccacctgtcgaaaaagcgccggcgacgcaccgaaagtcgaagctgaccgtctggatgacgccgtcgagccgcttcagacgctcccgcagcatccagcccgggatcgccaggaaggggacgatctgctcccgcgccttgggcaggatcgccggcggcggttcaaaggccgcgaacctgccagtcgcttgggtcaggcaagctgttgggggggcgggacagtctgccgttcgacgcaccacttgtcgaagccgagcggcggctccgcagcaaacatctcgcggtactgaacgacggcctcggcgagcgtcttgggacggtcggccgcctgtcgccgcgccttagtcttagcggcctgatcagatcgggtagggtcagtcgacagctcgtgcgagcggggcagaggggaggccgcacctcgatcaggagctcgaccggatgctgctcgagcacgtcgcccggctcgagcggcggcaggacgacaaggccggtcgccgtgatatcaagccccagctcagaccagagggggtcttcggtgataggggcaacctcctcgatcgagagtggctggttgcccgcgtgcaggctggcgatgaacgtccaggcggcggccgccagaccgagcaaaacgaggagcgaccggagcggtcggcgcccgagctgggcattcatgtgcgcgagcggagcctttgagcttgtcttgagccggagcacgtctgacggcatcccgggtcgggaagtaggcagaaaggttcaggccaggccgttgaagaggagtgtcagttgcgaggagttggtaggaggacatgacgggacgggaggccgaatgtcgagcagcaagtcgtcccttcgagacctcacccgtcgtcgtcgacccaagaagtccatcggccttactcttcggcccttagtcgctgctcttctacaaggtcagaacaggagcacgtttctccgaggcagagacaatggccccctctgcgctcgtgtcgacgctcgtgccggcgtcgggcgtctcgcacgtcctcttcctgccgctcacgccggcgacccagcatccgctgccgatacgtacgtcgcctgccggcagctctttgcccgcgggccgagtgctctccaacctcgtcctcgcccgaggccgtcgtctgcggatctttgaggtccgcgaggagccgctcccggcagattctggcagcgagagcggtaccagcaccgccagaacggccacagccacgaccatccggctgcagcacgttctcagccaaaccgtccacggcaacatcaccggcctgggcgcgctccggacgctcggctccaagcaggacgggctctcgcgcctcgtcgtgtcatacgaggaggccaaggtgcgtcgctcggtctcgcaatggatgaggctcggctgaccctcataccctccttagatggcactccttgaatggtcggactcgatgcactcgctcattaccgtctcgcttcatacgtacgagcggacgctgcgtgtcgtacgtccgagggctgtagtgatgccgactcagcccgatcagctgactcgcgcctcctcgtcctgcgcatgcctcaggcgcaggccgacgctcacgtctacgtgcccgcgctccgcgtcgacgcagagtcgagagcagctctcctgactctgcccggcgatgcgatcgccgtcctgcccatcgtcagcggacatattgctgattttgaggaagagctcatcgggaaggcccgcaagtgagttgctcggttcacgcgccccttccgctcaacagccgactgacatatctctcgtctttcgagcagggaggtgccttacacgccgagcttcatcctcgagtttcccgagctcgacaagcggatccagcatgtcaaagacgtgtgcttcctgcccggcttcaacagcacgacgatcgccgtcttgtacgcgactgtcgagacgtggtcgagccggctcggccaggagcagccgccgtcgaccatctcgctctatacgctcgacgtgacctcttcgacgcccgtgtcgtcgtcgacgctcatctcacacaccttcttgcccttctcggccgcgagcctcgtgccgtgcccggtctccctcggcggcaccgtcgtcctcacaccgaatgccctcatccacgtcgacccgtcgggcaacacggtcgagtgcgccgttaacctgtaccaccggagcgaggtccctgccgggctcgaggttcgcggccagcccgacctcggtctgcgactcgaaggctcccgccttgtgttccttcagcacgctcagtccgaggcgctcctgctgcttgtcgacggctcgattcggcaggtcctcttcatcaaagaaggacgccaagtcaagtcaatcaccgtctcggctgaggagacggccaagggcgcagcgccgagtggagtcggagcgatggcctggaagtctgtcggcgagggtggcgaggacggtaccgttctgctactcggaagtgaggttggcgaggcggcactcgtcaaggcctggagcgggccacaggaagccgcgtcgctgtccctgccgaaagccgccaaggctgagaatcctggcatggacgtcgacgacgacctttacgcgccgtcccagcccgcagccggtggagcgccgctcagcctcgacgagccgctcgaccagatcctttcctcgatgacctccttcctcgccgcatcgacgtcactcggcagcagtctgcggctcgacgtttgcgaccgcctcggcgatcatggcaacgccgtcgacctctgcttcggcatcggcgaggccggccagggcatcaacgacccccagctggtcaccctcggcggcgccggcgcgtcctcctccatcaacttcttctacgttagtcgacctctccgacctccgacgtccatcctgccgactgcaggcggtcagctgaatggtccctctccctgtagcgcgacatgccatcgagtaagcgccgccgtctcgacgtgctcgacaccgctcgcaacgtctggtcgctctcggttgccggttcggcttccgccgctgacacgacgcgtgatacggtgctcgtcgtcgacgaagaccacgagagcggccatatcaaggtgagcagcatgatcgctttcggcccctcgcagagtctggcgcgctgacggacgtgacccgttccggcctgtgcttcaggtgttcaacctcaacctagggactgaagaacctcaggtcgtgcgccgcataccgtccgccgctatcaccgcaggcgtgcttttccggcaaacagcctttgcccttgtcacaacgacgaacgttcatgtgcttgaagccggtgcgttgttgaagctgctttgcggctccggatcccctgctcgagctcatgtcgcgtctctgtggcagatggccgcgagcgtcagtcgataccagccccggcgggcgtcaactttgtctcggcaagcgtgtcagacccttacgtcgttgcgcaacgaagcgatggcacgacgagcctcttcgttgcaaacgcgaccgagggcatgctcggcgaggagacgctaacttcaggaagcggagaagtgcgtccgtcgaagctcctgactgcttggatcggtctgctgacggttgcttccttttcattaggccccgggcctccattgtagcgtcttcgaagatcggtccggactgctcgctttccggccggacgtgaaggccccgacagcagcagcggctgagaccctgacggttgaggaggaggacttggccttgtacggcgacgacgaagagatgaaggacgacaaggcgcagtcggcgacgtcttctactcctgcaagtactttgagctcaggcagaggcagccaatggatctgtctggccttcgccgatggccgcttcgaggtcggttcggacgcagttccttcatgctcacgctgtcgtgcgcgctgacctcgtagctctccgcacaaaccagattcgggctgcgactacgaaggagcttgccttctcgacgcgctcattgacaagcctgccggccgtcctcaacaacgagcgcgatgaggccttcggcgaggggtcgccagactcgaccgctcgcgtctcgatccagcaggtgctgctggcgccgatcggccgtcacgctcccgtcccgcatctgctcgtacgtatcatcgggcgcggtcgcactctgtaattttgactgaccgccctccgcgccaacagctcctcactacggccggcgacctcgtgacgtacgagatcgtgacttccttctcttcaatcgtgcctcccactacctcggccggccccctagcgctccgtttgatcaaggtcggccatcgctcgattcggctggcagacgaagagtcacggccgacgaggtcaccagcgccccgtctctcgcccttccaaaacctgcacggcctcacaggcgttttcctcagcggctcccttccccactggatcctgcgcgaggacgcgaccccggtccagatgtactcgatcgacgagccatctgtgcgcgcctttgcgccctcgtccttctacgggcacaaagaagagtacgttctggcgaccagcgagggcgcccacctcgttgccgttccgccgagcatctcgttcaaccagccgctgccggccaagcgggtcccaaccagccggacctactcgcacctcgcctttgaccccccctcgcgccacctcgttgccgccggcgtctttgcaatccctttcgtcatctttgacgaggacgacaaccgcatccaggtcaagcagcccgacccaaaggtcctgccgctcaacgagcgttcgtcgctcgagctgcttgactatgacacgtgcgagatcatcgacggctacgaatttgccgacaacgaggtcgtcctcgctctcgcctcggtcaacctccagacgaaacggacgccgctcggtttcaaggactacatagccgtcgggaccggcatctcgcgcggcgaggacctctcggagcgcggcgcggtttgtccctcccgcatcgcgcctgttccactcatcgtctccagctgacacagagccgttcgctgcaccgcagacgtacatctttgagatcgcagaggtcgtcccggatccgagccgaccccaatgccggttcgggctgaagctcctggcacgcgaggcctgcaagggtgccgtcaccgccctgaccgacctgaccggctaccttgtgtcgtcgatggggcaaaaggtgtgtcatgaggcggggtcgggttttaccgcagcggctgatctggcatccgcacctggccgtgcgactagatctttgtccgcgcgttcgactttgaggaccggctagttggcctcgccttcctcgaggtcaacatctatgtgacgacgctgcggacggtcaagaatctgttgctgatgggcgacgcggtccggagcgtctcgctgctagcgttccaagaggacccgttcaagctcgtgcccctcggccgcgactaccgccagcagcacatcgtctcggccgactttttgatcgacggcgatgatgcggcctttgtcgcgtctgaccgggagggcaacctccgcgtcctcgagtacaacccggcccacatcgaggccgagggcggccagcggctcgtgcatgcggccgagtactaccacggcaccgagctctcgacgaccgtcatgctcgcgagacgaacgtccgcgcgggacctgacggccccacaatcccagctgatgctcggtgcgtttcgctagatcatcgctgctcccgacgtcgcccttgcagatggctgacgactcccgtctgtgcagccggccacgacggctctatcagcacgatggttgtcgttcaaggttcgaccttcaagcggctgtcgctgctccaaggccagctgctgcgcagcatgcagcagttttcgggcctcaacccgcgtgcctaccggtgcgccaccctcttcctgcggtttatctgactcgctgtcggctcaatcactcaccttgtattttgcatcctcgttcggccagaaccgtccccaatgccatcgctgcccgacctctcaaccggggcgtgatcgacggcgacctcctttacgactcgttccaagcgctgcctttcgacaagcagcgcgagatcacggcacagatcgggacgtctgtcgaggccatcatggacgaccttgaggagctcagggcggtctggtgaactcaaggcactgctcctgctccaccgccgcatctcgcgactcccgggcgcaaacaacctcaaggtggaaacgcacgtctttgggcgaacgacgtgcgggcttggcagaacagcgaaaaggagcagccataagatcgagatgaaaggacaagggagaccgagaggtaaaaaacatgtagggagacgattcaattggacacgagtgggccagatctagatcctcagctgagaggaggggctctggaaggaaagcggaaagtgcgagcccatggcgaaggtaaggcggcctctagttctggtcctcctgcggggtcgcgacgctcttgatgtcggcctcgaccatctccttgacgagctcggggaaggtgcacttgcgcttccagccgagctcgcgctcggccttcgacgggtcgccgtgcagaaggtcaacctcggccggccggaaatactgcgagggcaagagacatgggtcagctgcgcgggccgaagctacggccgacgactgacgctggcaagaaggacgcaccttttcgtcaatcttgacgacaggcttgtcgttggccgtgttgtaggcgatctcgtcgacgcccgagccctcccagcggagcgtgatgccgacgtggccgaaggcaagctcaatgtactcgcggatctcatgcgtctcaccggtggcgagtacaaagtcgtcgggcctgcgcagcagagggagaggacagttgagagctgaggttagccgcctgagttctgccaggaagtatggctgagtagccgtcacgcacgagtcctgctggagcatgcgccacatgccctcgacgtagtccttggcgtgtccccagtcgcgcttcgagtcaatgttgccaaggtagagcgtctcgatcttgccggcctggatctcggcgacggcgcgcgaaatcttacgcgtgacaaacgtccggccacggcggggcgactcatggttgaagaggatgccgttgcacgcgtacatgccgtacgactcgcggtagttcttgacgatccagaaggcataaagcttggcgacgccgtagggcgagcgcgggtagaagggtgtcgtctccgactgaggaatctcaacaaccttgccgtagagttctgacgtcgaggcctgcaagagcgtaggcgagtcagcagctgcaactggcaaacgagggcgctaggaagacaagcggcgcacctggtagaagcggacgtgattctcgaggccggccgtgcggatggcgtcgaggatccggagcgtgccgagaccgtcaacatcaccagtgtactcggccatctcgaacgagaccttgacgtgcgactgagcgccgaggttgtaaatctcggacggctgcgggcagggcagaaggagcgagtcaggaagggccaccttgcagtctcgacagcagctgcggaagtcgaaagggggctgacgtacgaggacctgcgagatgatgtagacgaggttggtcgtgtcgctgcgagacgaagagcaaggtggcaggccgttagcaaagcggccggccagaaacacatccgggcgaggcgatgcgcgcgcatccgccggatgagcctgggactcacgtcaggtcgccatagtgcagcttgaggttcttgtggccgtagaggtggtgcaagcgaccggtgttgaacgacgacgaccgccgaatgatgctatggcagtccaagagggtgagggaaggagcgggaacgagttagctagcagagacgcgctcaaagaccgctcggacgagggcaagaagtgaacaaagtagcgctgtcggcgaggacacgcacccgtgaacctggtagcccttctcgagcaggagctcggcgaggtacgagccgtcctggccggtgatgcctagatcgggagggcgagcgagcaagtcagccaaagccggcctacggagacgtcgtcgaccttgtaatttggacgatcccgaatattagagcgtgcagacgaccggctagcgacataccagagatgagggcgaccttgcgctgaaagtaaacgtcaggcggcgggtaggcagccttgacgatgttcatcgggtcggcctggcggtgggcgaacgacaagcgaacgaccgcgaggacagcaggatgggagaagcgaagcaagtcagctcgatagcatgccagccacatccagaggtgccacgcgcgatctcaatggcggtcatggttgcagttgacgggagggatcgaggagggttggtcggcagagaggatggacgagaaagcccgtcgagacaaagcacgctctgctcttccaagcgacgcgacggagagaaccctctgcgagtgattcgagcctggctggttgcattggccgctgccgaggccccgccccgcggcgactccttcctcatgctccccgcccagagacagcacgaccgccttccccgagactcgcaccaccactccttgccagccaggcccgctcgtctgggtcgcaacctcggcggcgagccgaagccactcccctcatcatcagcgctgagccagtctctgtcggctccccgcccttaccgctcgctgatcggctcgttgcccctcgctcacacgcattgcgctgcctcgaatcctggatctttcaaagggcgagcctttggacctgacgaccctcttcaccctcaccttcacccatccagcctagtttcagcgtcagacagctcgtcccgcacgcccgccggccccatcgcgctcgagtaagttcgtctccccccgctctgccttcctaccacctgccttcgacatcgtcgtcgtcgtcaggaccggcccggccggccatccttcagcctacgcctcgcacaacccgcgaacattggcttgtcaacaagaactacaaggagagatcgtgttctgccgcttggccgccgacagcagctgacgccggtgtgctctacttgtcaggtcaaacgcagtccggacctgaaaggcggcaacggcttcgcgccatcgctcctgaacttcttcccctcggcatacagctcctcagcttcggcccttccgcgcccgacaacctccagcctgtctttgtgacgcctgtcgatctggagtgtcgtcgctttcctcggtcgctctccatggccgaggctttgctcgccgcaggctgtgtgcctgcttctcgtcaccgttagcctctacctgctccggctggtggtccccttccttccgtcgcacgcactcgtggctgccggcaccccggtctggcgaccgacgactgctttcgtcctgcctgatgggtggtcgcctgtcggcgccgttgaacagctaaccacgaccaatctctggcggcggctcgtcggccgcaagcgtgagcagcagcccctcgacctcgaccaagcgagctcgccgctcaaacatcgcatgacggcgaacggcctacttgaggttgacctctcgctttctacgacgcgcctacttgaggttgacctctcgctttcggcgacgcaacacccgatctaccgtgcgcaacccctttggcactcttttctcctggtgactctcaactgacgtctccgcccgccctctctccagagctcatcgaggaggccaaggatgagtgggaggccaaggtcgcccgtcagttagagacgctggccgaggccgtcgccgagtaccggcgtcgcaacgacggtcgcaacccgcccaagggcttcgaccgctggtgggcctacgtccagcacaacaacatcccgctcccagacgagtacgaccgcatcaacgccgatctccagccgttccgggccctgtcgcctgccgtcctccgccggcggatcaccgacctgcagatacccggcaacggccacgagacgttcacgctcgccgtcaaggacggccgggcctcgacgtcgcgctcgacgtttgacgccgacgcgatcggcggttccgacgaccggatgcagagccagctcgagcttatccgcgacgttgcctagcacctccctgactttgaggccgtctactcgattcacgatgcgccgacccgcttcatctcgcacggccaccggcaggatctcgacaacctcatcgaggacggcagctacctcgacccgctcggggaggccgacaccgatggccacggttgggcggccgcctgcccgtacggctccgcgtttcgcaagctcggcgaacagcccatccctgccggcaagtcgttcatcaagtcgcacgtccagtcgatggacctttgcgccacccgtcggacccggccttgcacggcctcaccctcggcacgaggcccgcaccgcagacgaccctcctgcccatgttttcgctctcaaatacgaacctgcacgccgacatcctcggcatcccagtcgagcagtgggccgagtccccctcggaagcggcaataaactgggccgacaagtcggacgaccggctgctctggcgcggtcgcaacaccggcggcatcttcagcaaggacgttgagtggcgctcgagccaccgggcgaggcttgcggcgatgagcggtgacgacacccgcggctggacggcagtcctcccagcgccggcagccttgcgactgaggacatttccgaacggtctcttggcaatgcaacactccagcggagccccggcgatctcaaccgggcgatgctcgacgtcggccttgcctacgagcccatccagtgctcggtcgaggacggcacgtgcgacgagattgccaacgagctcaccttccggccggtcaagcgcttcaaggaggagctcgaatcgcgcttcatcctcgacgccgatggcaacgcctggtctgcccgcttcaaacggctgctgtcgaccggtagcctcgtccttgagtcgaccttcttcccagagtggtggaacgactgcgtccagccgtggtaccgtgagtctggcctggccgagtcgttcctggaagagtctcgttcgttgacccaactctcctttcaccagactacgtccccgttaaggtcgactaagaggacgtctacgacatcctgagtttcttccgcgggatcgacgacgccggcgccgagggcgtgatggcccttgcagagcgcatcgcacgccagggcctcgagtggagcaacacccactggcggaaggaggatctgacggcctacgtcttccggctctacctcgagtacgcccggctcacctccccggaccggtcttcgagggcagactttgagctgccgccgtctgcgctgtctccttaggcttcttcgttacgtacccctcgcctgctttacgaccgaccgatcatctccttcctcgtcgcacagaccaccgctttctcgcactgtcccactgtatctctgacctctttgcatcgcatgttctcgcctaactctctcactcgcgagtcagttggcgacagtgccggtcggccgagtcgtcatcggaggcagaaaacagccgccgaagctcgccctcttttccgcccgccgccggtcgagtcaacctcacaaccacatccttactctctcgctctcgctctccctccccaaggaaacctgcccgcccgcacccgttcttgtgcatgtacacggcacgcaccagtgacgactgtcggtagtcgcgctcgcctctccccgaatgatcgacggctgaccaggctgctctgctctccctgctccccccgcctcctttgactgccttatcgccgcgccctcttcgctgtcctccagacatctccgagcaagtctaccgccagtgcaatccttaagatcgcctctctcgcgccactttcatcctgcattaccatgtccttcctcaccacctccctccgctcgtcgctccggcgcggctcacccgttggcgtccggtcgctcgcctcggccgtcgcggcggccaagatcccggcgacgcttcacctcaagtcgggccagtcgtttgccggcacgagctttggcagcaccaaatccatttggggcgagaccgttttctcgacctcgatcacctcttgtgcgttttgtcacgttgcagaggccttgtcagccgacgttccgactcagctgacccagtgccgacgactgacttctgccagacaccgagtcgatgaccgacccgtcctaccgcggccagattctcgtcttcacctcgcctctgatcggaaactacggtgtgccttcgaacgagccgacggccgagtttccgggcattccgcagatggagtcgaccggcgtgcagtgcgcgggcgtcattgtcaccgacgttgcgctgaagcactcgcactacctcgcggtcgagtcgcttcacgagtggtgcgaccggcacggcgttcctggcgtctcgggcgtcgacacccgggcggtcacgaccctgctccgcgaccaaggcacgactctcggccggattgccgtcggcgaggctgaggtcgccaagcctgcgcccgcggccgaggagtactgggacccgtcgaccgagaacctgattgccgaggtctcgaccaaagagccctatgtcctcaacccgaacggcgacgtccacatcgccgtcatggactacggcaccaaaaccaacattctccgctcgctcatgaagcgcaacgcaaaggtcacagtgctcccttggaaccacgacttccatgccgtccaggacgactttgacggcctcttcctttcaaacgggcccggcgaccccaagtcgatcctgccggctgtcaacaacctccgcaagacatttgcttcgtacgacaagccgatctttggcatctgcatgggctggtgcgtggctgcaagccctccgaaaccgaaagacggccttgcttgctgaccggcgctctgcctgccccgccctgcgcccctccgcagccagctgatcggcctcgccgccggcatggagacgtatcgcatgacgttcggcaaccggggccacaaccagcccgtcctcgccctcgtcgactctggctcgatcaaggccggccgcgtctacattacctcgcagaaccaccagtacgccgtcaagctcgacgagttcccggagggctgggcgcccttcttcatcaacgccaatgactcgtctgtcgagggcgtcatctcgacgacgaaggacattcggggcgtgcagtaccaccccgagtctgcgggcggaccgctggacacgatgcaggtaggtcgccgtgttgcattcgaccccttgccccgatcggctgcagcggctgaccgtcgactcaacctgcgcaaacgcagctcttcgacgactttactgccgcttgccgtgcccgcaaggctggctcgcccatcggccacctccttggcaccgacaagactcagaccgacaaggttgccagtgtcatttgagcaggagcgagcgtttatgcgatgcgatctagacctgatgactttcgcagtggcagcgactccagaggaaagcgagggggaggggcggcgtaagcgagtcgactggtcacctggtcccttgcgcgattgatggcaacagcaggcgaacagcatggctgttctcagccgaagcgccgagtcgtgccaacggatgcaagccgacgtgtggccgtcggtgcgtcgcgccgcccttcgtcgcgtgcgaccccttcgcctcgacttgcctcgctcgccgaccctctattccaagttcagagctaccctctcccaacccccgtcccctccccctcttctctcctcgctcctgcctcgccatggtcgaggacaagtacatcggactagcccttgccatctgcgcgtcctgcgccatcgggtgcggccgtctccctctccgagatcccgttttcgctcgttcgcgcctgccacgggctgactctcgtcgtcgagcgcttccgtctctgcagcacgagcttcatcatcacaaaaaaggtgaggccgagctcactccagctggaggcgtgggagctgcgtgtgaccgggggcgtctagctaggcgagccctggccaaggctgcttcagcccaggctcgccctgcgctggccgacgggcttgttccctccgaccatctcgctccgggagcttgtgtcgtccttgagcgctgccataacaactggctgacacgacatctgcaccgtcagggactcacggctgcagctgatgctaggggcagctcctcgagtgcgttgctcgcccggtcgcgctggctcggacgcgtcgttctgcctctgacttgcctgcaacctcacagccgacgagctggcgtatctgaagaacccgctgtggtgggcgggcatcacgacccgtacgtcttgacctgccgagcggttgcagtcggactgaccgccgctctcgtcctttccagtcgcggttggcgaaggtacatccgccggcctgccggctgcgcttgtctcacgtccaccgactgactcgcacccttactctctgacactctctgaccgtagtcttcaacttttcggcctatgcggtgagtcttcttggacactgtgacatcgccgccatccgacagaggcctgacgcgttcccaatttgctttcagttcgccccggcgattctcgtcacgcctttgggcgcgctgtcggtcatcatcgggtgcgcctgtcgccttcttgctctcacgctcctggtgacctgacgctagcgtcgctcgtcgcatccagagccgtcctcgcgagcgtctttctcaaggagcggcttgggcggctcggcatctgcggctgcgcgctgtgcctgatcggctcgctcgtgatcatcatgcgtgcgtccgttcgaagcctcgcctgcgttgatacaagaactgacctgtcgcctcttactcgcgacagacgccccggcggacccggaaattgagacgatcgaccagatctggaactatgccgtccagccgagtgagtggccgattgtggccgcgtcgcctgggcatccgctgacgctcccccctccccgctggacagccttcctcttttatctcgccttcgtcaccttcttctcgctgtttatgatctaccgcgtcatgccgacgcacggcaagaagaacccggtcgtctacctctcggtctgctcggtcgtcggctcgatcagtgtcatggcgatcaaggtgcgcgctggcccatgctcattttctccagctcactgaagctgatcaagcgtgctcgctctctcagggcctcggcgtcgccatcaagctgacgtttgcgggcgacaaccagttcacgcacccgacgacctatctctttggcgctgccgttgccggctccatcatggtccagtgcggccctgcctagggttcgacttctcggcacgcgactttcttctggctgaccctcatcccgcgctcttccaggatgaattacttcaacaaggcgctcgagacattttcgaccaacgtcgtcaacccaatctattacgtcttcttctcgacggcgaccatctttgcctcgctcatcctcttccagggcatgggcacgaccgacgccgccgacagcgtcagcctcatctgcggcttcctcgtcatctttatgggcgtctatctgctcaacctgagcagggagcccgacgcgccccaccaccgtggcggcctcgaggccggcctcatgagtccgtccaccgccggcacctccatcgtccttcacgtactgacctggctttgtcctgcgcagaccctcggcagtcgatcggcggccgcttttcgagcgacgagaactacgaccacctgccgctccagggcggcaccggtcgccgatcgtccctcttccgccagcaatccgactcgatcgtgcgtccctctgtcgctccagtcgagctccgtcgcatgctgaccccccggctcatacgtctcagttcgactcgttcaacgaggagtcgatggcgctcaacaatgtgcgcgaggaggaggaggaagaggacgaggagcccgtcaagccggcgccaagaacctcgaccggaggggtgggctccggcagtcggacaaacggcgtcccgcccagcccgcggagatgagtggcagtacgggagagcgaaaagttgcctgcgcgaaagcccgtcgatcggatgagccgctggctttgcgagagctcacgacgcagcatgcttcgctcggcggcggcggctgtgtcggcttaaggaagaggccgtctgtgtcgagcatgggctcaggaagaacgaaagaagggcatgagatcgtacgcaaccgggtcggcgatgtgtgctgggcgtggcaaccgcttggatgggccgcgtgtgaggcgtgaccggtagggctcgtcacagccttggggcttgtccgctcggagacgcagctccctgggtcgacgagcacgtctagcttgctcgtcgaggatgaaccagcgcgctatttcaaaacggcgctgcagccgtcaaggccgtctgccgcggcaggttgaagactgtcgaaagaccggcgtgagagagggataagcgcactgcgtcacattggttgttgatgagaaggacgacgcacgctggtccttgagcacctgggccatcatcgcatgctgcgactcaatggcgatacgcgacctggagaggtggcgccagggggctgttagccacggctgcggtaaggaaccggctgcgaggggagcgacgaacccgtcccggaccgccttgctcagagctccgccatcctcctcttcccgcaaaaccggcccggactctgctgagccgtccttgacgtcggccgaggcagcggactttgtcgacggagcacccccttcgcgggcatgcgccgacgactgctggagcgcaggctcggcctggacgagcttcgccgtcagatccgacagctgcgagacagtaaacttgcggccctgctcgagtgggaaatcacggtcaggagtcgagcacggaggataggacacggtcgcggacgagacggcggacatacagagacgagcgacgagctgctgagcgtcttgacccagtaccgctcccagaggaggtcgagcagctgactgtcgagcgaactcttgaagacgctcaccttgagcgggtagtattcgttggcgtgcgcgccaaagtcctcaatcttgtcgaggggcacgctctggtgcgttccggcgcccgatggtgtgtggccctccgggtaggtccggaaggcgccgatgtcaaccttgccggcggagacggtccggttcgggtcgacgacgagcgcgaggaacgggtcctgccagcgctgattcgtcatctgggtcgagacgtcaatgccagagagccagcagccgtagcccgggtgcgctgcacggtggcggagcgcaagataaatcgtcaggcatcgcacgagagcaattcaaagggcgcgaaaacggacagtgataccctgagaggcgtcgtacgagccggagtcgaagcggcaggtccgagcgcagagaggggtcagcggtcgaggcgcagcaggcggccgagccacatcaggaaacgcacagccgacaatgtgctcaggccggtcgacctgagtagcacaaaagacgccgccgtcagccttcttcccaacagtgaaacttctcgagacgggcgcggctaacgagctggctgccgtcgcggtgggcgatcatgtagccgtcggcctcttgggcggcgttgacgcgcgtctcagtgccctggacgggcagcgcaaacgtgtccatgacgacgaacgcccggttgaggaccttgccctggaggagacccatgatctcgtagatgccgccggaccgggcgtggatgatctggcgagcgttgcgcgaatggacaggcagggcgtgtgcgcgcgcagaggggacggacgaggctcgagggtcagccggcgcgccctgcagctcggtctcgcctccgcctcaagcagctccagctccggaagcagctactgggacagaccatcttgatgagtgcgatggccgagatgcggacctgcgtcgtgcgagttaacgagcccggccggcgggaatcgtgtgggttagctgcggagtaggaagagaggggcgactcgcgagcgacgacaagctcgccggctcatgccgctgctgagagctcgctagcggacgatacgcacctcgttgaagtagtccgggctggcagtagaagagtcagagagcggatgcagctccggcaggatcagcgatggacctccgctgaatgagcaaggaggacgacgtactcgcgcttccacggcgcatcggcgttgatgcgcttctgctcggccgcatcgtggaggaggatctcgtcctgcgggtcgagcggccggacgtcgttcaggagctcaaacgtcttgcgggcggcgtcagacatggctgagagggaggcgagtggaacgatgatgatgcagaggaggtcgacgtcagaggggggctcgaccgccgagacggcagcttgcgtcgccgtggccgctccctacaaccgcccttgtcgtcaattgacgtgccgcccgagccagacctcgccgacgtcagagcgtagactttcgcttccgaacccgatgaccaagctttccgacatcgaggcgaaccgctcgccatgctgtgccagccccattgcatgcgtctgtccgcgcagcgctcttcgcgaccctgcgcccgaggtcattgtatcggcctcgagagccgacctcggctggacaagcgggagatgggtcgacgcctccgcctcgcgggcatcgtcctctcgagcctgttctcccgagcgtgtgtatgagaagggcagaggccgctctgcttcggcgaaggacagggtactctgcgaacatttgacagcatggtcgtcgatctggctactgctaccgatgcgaaccctcagcgagagagcagatggaagaggttgccctcccacatctgcggcgcggatcgggagccgacgtcagcgacaaaccattgctgcggcgcctcaccagcagacacgggtacgacgcaccaaggtctcaaagtcggcaagcgtcagacccgcctttcccgttgcgttcgagaacagctgcaccatctccttgacctgccgacagagaaggtggatgattgagagtcagcatcacctgagcgagtgcagcggaagggaatggcgctgtaccaggtcggccgagacgtgtgtctccttgaggtccttgacgacagcggcgaccataccgaccgtcagaaccttgtcgtcgacagcaggcccagcgtccggagggaagaagagcgcaaaggcctcgcgcgccgtccgcttctcgcctcgcgagagctctggccggccgcccgagacgacgaccgagccccgcgaggccttggacgaacgcttgcccgccgcgcctcgcgacgtcttgccgtcggcgcccttgactcgacccgagcgagacggccgctcaacgccgtcaaaatcacctttcatctcgtccgagtcgctggacggcagtgagggtgccggcgagagtcgggcggcggagcgtgtcgtccgtcgagtgcggcgccaagtcgcgtcgctgaggttgagccctgagttccggccgtcctcgtcgaggtactcgtcctcgtctgcctcgctcaggtccgagctcgccgcatcctcgtccgaggccggtctctcgggctcgacgttattgtcctcgccggcccgagagacgaggaggacggcgcagacgctcatccagtccttgcgactgacgccccggcggtcaaccgagtcgtcttgaccggcttcggcggcctcgttgtcatccgcgtcctcgcccatccagccctcggccgactggcgaaagaactccagcacctctggatctgatggagggagtcccgccagccggagcgccgccgagacgagcgagagcggcaggtgagtcctcgtcgattgcctgcgctcgtcctcctcgttgccggcagcctcgcccggggcatcagcaggaggcgatgtcgagacgaagccgccggggccagcctcgtcgtcagtcggaagggatccgccgccctcgtacatgtcgtcttcagccgggaggaagccgccaccgccctcgtcgacttcagccggcaggaagcctccttcgtcgtcggatgcgggaggcgactcgacgacgccgaccctgcgccgcttcctcctcctccgttctggctcgtcaccctcccgagatgatgctacagccgttgactggccggccgtgtcgaaagcgcggagaagtcgatcccgctgtgcttgcgagagggcagcgacctcgggctcatccatcgcgacattggccagggcggcagggtcctgctcagcacgacggcagggcggctgcgagcatccatcctgcctgcctagttagcccagagcatgccccgctgccggtctagagcgcagcttacgggcgcaccatgatcagccggtaccgaagaagctgcttgattagaggggagaaaaaaagggttcgaggtagtggtcggccggctgctgggtgtcgaatgcgcagccgacgagacgacgcagaggaggcggcggtggcgtcgctcggatcgagcttgacggcttgcagcatgcaacccagcgctctcatcgacactgatgctgcgagtttgcgaggtgtctcttgatcgcatcgtgtcgtgattgaagcgcatgaatgctggagattgggctcgcgagagacctttcgagccgggagcacctcgtctctcccgacattttgtcaagacccttttctttcccgatcgattactctcgacgcgcacgtgctgcatgatgaggctccatcaatcgcggtcgaaagtgggcgacagtggcagcgggatgtgagctgcttgctccgcagggtctggcgtgcccttgccgccggtcgaagtcgccggcgtgccctgaagcgagcccttgcgcgaggacgtgccgagactacccgccggactgagcggagggaacgcgctgtcggccgagccgaagtgctgctggcggccggtgactggcgcgtgcgcgagtgcgggcgaggagtgaggtgaagctgaggagaaggaggcgtaggagggccgactcagcggctgataggcgagtgggtagccagacgctgctctggacgttgatgaggcgacggctgcgagcgagtaggatcccgacgagggctgcggcacggcgagtggcggcgaaagcgtggctggcgaagtgaggagactcgtcgtggcggacggcaagggcgggaaggctgccggttcggccggcgtcggatcgtctctgtcggcgaagacggccgtgtacgggtcggcctgcgcgttggcagcgaggaacgtgctctgggcgttgtgcgcgtggctgttgactcccgccgactcggccgaggatgacgagagcgcgtgcgggttctgtaccgtgaaggaaggcgatgaccggtggtactggtatggcccagggtgattgagcggccggaaggggacggccgaaatctgcagcggcgacgtcgacgatcccggctgcgaaacgacgtccgtggcagggaaggagttcgacgatccgcctctctgggtcgcactcgccttccattgaccgccgcgcggattgctgcttccctgtgcgaccccagctctcgcctgagacgctggccgccctcgagcttgctggccgttgtgctcccctgccagccggagcgtggatcccgccgacgggccgtgagcctggccgacgtcgcgcaagattgggtgcgtcccggccgcgacgtcggccttctccttggtgattgcttcgagccgctcattgtaagacgagatctgggtcgtcagccggtcgtgcttggtgttgagctgttgaatggtgcgccggtcagcaggcctcgagttgcccaagagctgaaactcgcaacgcaccttgtcgagcttgccgagcaacgccgccagctcagcctccctctctccgaggaggcgctcgttggcgccaacgacctcgtctcgctcgacctcgacctcggcggcctctcgccgaagggcctcccactcggcctcacgcgccttctcgacagcctccaacccaagctcgtctctgacgaagcctccagcgatctcggcttcaagccgctcacgctcgagttcgacgtcgtctctgctaccgacgatccgtttgacgctctcgccgagcgcgagagccttctgccgcgcacgaaggtcgccgaccgtgctcttctcggccgccttctggagtgcgctgatgttggcgcgaagggcggcctccgccttctgcgacgttcgccgatgcgacttgagctcattcgcgagctgggcggcacgggcttgtgacgcagcgagctgacgatcaaggagcgcttgaagtgcgtcgggggacgcgggtgttgagaagaaactcgtggccgaggagagtttggtcgtgggcgaggcgagggccggctgaggacgggcgactgtgagagccgagggaccagcgacggctgccgccacagcagtagcggacgaggccaaggcgtgggcgatggcgggcgcaggcgtactgttggcattccctgacgacgagtttgcacgcgatctcgatcggagcgaattggcccgtgaccgcgagcgcacggccgaggtgccagctagcgaggctacggcggacgactgggccgagactccagcaggacccgcactcgaagctagggtagagcgaccctgtgaagtcacaactgagccagtgcgggacgacgctgcgcttgtcgaggcatctgcagcgtctcaagggaagtagatgagcgggattgccagtcgaaaggttgcctgatcgcaagcggacgcaccgatcgagaggtctgggaagcgttcgtcctcgtcgccggccaggccgagctcaatcacatagtccctcccaggactggtgaagacgcaaggggttgaagtcagccctcaacaactcttcgcacgggagaacctgacgagggcgacgcaggacgagcgcagacgtaccctaggccgtagatgacgacgacagcctcgtcctccccttcgatgacatgggcagccacgctccgccagggactgccgttgacggtcaccgcgaggcccttgctgaggagcgtcgcgaagtgtggtcggctgccgccacaggaggtgccggtcgagctctcgccgaggtcgaccggagacgagccgaggagctcggacccgcgctggtagagcggatagtggacgtggccgcctctggctgcaacagataatgccgagcgcccgacggcttcctcctcgccgtctaggccgtcgcccgcgtcctcaaactcggtgtccgaggcctgaccgctggcagaagcgtgcgggagctgacgaggagctgccgtgtccaaggcagctgcggccttcttcctcctcggccgcttgactgggctagccgatccagtcaccggagcccgagcgatattaaagtcgtcctcggagcctccagccagccgtggcgagccgaccggcgtgagcgccgagaagtcgtacgcgagcgagaaggtgatcgagagcgaggtgacctggaggatctggagcgctagcaagcggtgccaagagccggcgcgagcagcccagcgcgtcgcagtcgccggagcggcgctcttgacagaggaagccggcgaggacggcatgcttggcggagtgtagtggcttgcagaaggcgagtgacagtcgaagcgaggcgagagcagaggagcggcgccgcgggcgaacccgcccgagccgacaggagggccatgcgtgtgccggttgcgtccacttgcttgcggccaatttcacttggagagacgtatggctttcggcacggacaggcaggacgtcggcgcttgcgagtggccaagcgttggtcacagggcagagaccgcccttcgcttctgcttctcgtcggcctcgctcgcgtgcgtctgacaagtcgccgatcatacatccggtgacaacccggcctcagtcgcaccgcactcaacgttgtgccagccggacaggggtggccgaaggcgtgaaaggattgaccccgacggtcctatggcgagaatgctaggagcggttcctgcccgcccaggtcttctcgtctgccgccctcggctcgggcttttccaccgaagtaccgatggaccagacgctggatggccagagagtgggcagagagattagtccgtagatcgacgggagtgtccgacagaccgagcttttgggcgcagcgagcgccacgggttcgacctggagacgtcgagcggtcctagcgcttgatgtagacctcaatggcacgatcaaagcctggagagcgaggtggccgaaccttttgtcagcaacacgagagggatggtgcaagtcgacagagcgacgacgcacctgcctgctcggcgtccgctgaagtgtggtcatcggcgccgccagcctctcgcagcaggccgtcctgattaaagccgacgtcctcgaggacctggccgaaatcggtgggcctgagctcgagctcggccagacgcgttttggagacggcgccttgcgtcttcttgacggcatccttgtaggtcccccacgcctgaggctcaagcacgagccggccgccaggtgcaagaacgcggtggatcttggcaaagaaggcgcgcagaccgtcgtcgccgtgatagaggtggatccatttggttaagctcagtctggtagggccattaaggtgcagagagtcagtcgagacggctcgagcaactaaaggagatgacgcacgcaaggacgaggtcgtagccatcggcgtccgcatcaacttcgtccgtcacccagtcggcagcgacgaagcgtacgttggccggaaatgtctgctcttggccggcagcgtgtgcgttcgcaacgggcggtacgaacccgtgctcctttggaagggcgacggggaagtagtcggccgtgccggtcgtcggctcgcgtagcgactggacgaatgcgaggtgcgtctgagccttgcggacgaggtcgggatcgatgtcgacgcccgtcacggccgcagcaccggcgagacctgcagcggttgacgaaatgcagggtcggagtaacagttagcgcagtacctccttgagctggcctgggtaagaagccggctgcacgcaccgagggcgacagagggcaggccgctgttggcgccaatgtcgaggacccgcttgcccgtcacccaggcctctggcaggcgggcgacgcgccgatcgccgagcaggaccgacgtccctcgcttggcatagtaggcctggtagttgccgtagaggggtgcggtcggggccatcgtcgtcgtcgtcgccaagacgaggcggcgtcctccgccgtcgtttctgccgcacgtcgcgtcttcgtcgcgttcgctcgtctcttcgcagcagctagcgcccgactctcacccgctagaatcgacgagcctcagactacgaccggagcactctgcactggtcctcgctgccgcctccgacgctcaggaaccgaaggctccggtcaccgctcgacatgccccggaggtcgctcgcggcgctcgccgtcgtcggcttcgtcctcttcggcctgtcgagactgcatgccgacctgaaccttcggggcttagtcgtctctcctatgactcagcgcgtcgacgtgacgccatccgtgcgccaggatgtcgtcaaggagtcggctcctaggtgcggccctggtcgctcgtctttcgaccggctgcccacgtcaacggctgcgccgctgacagcccgacactctcgcccgtctcttgcagcgctcagcttgaggacagcctcgtcgagggcgtccggtacgcggcgaccgccgtcggcgccggattcaacaaccagctcatcggctacatcatgctgctccagtacgcgcgagaggccggccgcgtgcccatccttggcgactttgtcgcggcgtcgaacggtaacatccagtcggggcggtcggtggctccctacctgccctttgtgcgtctccagctcttgcttcgctctgtttacaaagccagtctgacccagaccctcgctttttcaggaaagtgtcttcgatctcgaggcctacgctgccgctacgagtcaagcggtgacgactttcggcgcactcaagacctcgtcgtcgagacccgagacgattcagtgctttgccagcagccatcgaagcgagcagtcctcgttgcatggcgtgacagccgccgtatcattggggatctcgtggtcaacggccgagggcatcgacatggacgtctgggacgcaccgccatctgtcgatgtcgcggtcggatcgtatctcgacatggccgacctgattgccttcagcgaggaccccgtccaatggacagcagccgttaaccacgcgacggatgctcggaaggcggccgaggatcgcaaagaggtggaccctcggcagtcgtctgcagtgccttctcagcagctagcctgctggaccgacgtgggtgtctccttcctggcagcaatctcgccacagcagacactgacagccgtttgttgcgcaaccagctcttctggtcgatcgacaccgccgatatggacgagcgctggaccgtctggccggcgtgggatgccgctggaacccatctgcggttcgcgcctacgctcgagcgactcgcgggcgagtacctccgccaggtcctcggcgatcagcctcagccattcatcgcaatacgtgcgtcacgcagctccagtctctgggcgtccattctcaatctgactctgttctggcgccacagacgctcggcacggcgactttggctgcccggaggagtctgacccagcagccgggcaggagggcgcgtcgtgcttccgctcgccagcgtcttatctgccgacgatcgaggtgttccggtctcggcttgcagaagagcagaacgtcgaagtctcagccaacgcggtcgtcgtcttctcagatgagacggacgagcactggtggagcaaggttgccgccatgggctggcagcgcatcaatcacagcgaactcggcacagcacggcgcttcgacaactggtggccggtgcgtgttgttccgggtcctcgaacgccgtttgctctggtctgtcgactgactcatccctcgccgctgctctacctttgatcagaccctcattggtttgtctcgtccagctcaggccgtcatccgcgcacgctcaatcggctgatcgccgccctccttgcccctctgcagacatggtcctgatgagccaggccaagggcttcatcggcacccttgactcgacctactcccttctcgctgcccgacgcgtcgtcgactggcagcagggcctcgtcacgctagagaagcgctgatgcgcgcagcggtatccgcaaccattcgagcgccccatcttcacgatagagttggagcccccgcctaagcatgtctgctcagagatcgtctcgtggctctttctgcagtcaggtcggggcaacgatgtgcgcaggcgagcaagctggatcttctccttgtctccgcgccgttccgccctcgaaggcggggctcgacgccgacccgttgacggtcaccagcgaatttcccccatctcgcctctcctgaccaaacatgtcttctgctcctcaacaggcggccgatgccaggccaaagatcgcctacgccatctttgatatggttcggtccccctgcgctgccgtccgaggcgttactgcctctcgtcggagctgaccgatcggctcgcccgacccgactcgtgcccgaacaggatggcaccctcatcgacaccgagacggtgcgtgagctcctttccaactgatggtctgcgctgacgccgagccggctgcctgaacctcgcagatctacacgcgggtcacgaacgacattctcgcccgctttgggctgatcatgtcatgggaggtgcgtcgtcggcgccttgctccttcactcgcgtctagacggtcaccctcgactgactgcctcgcgtcccgcacaggtcaagtcgggcatgatgggaaagccggccttggttgcaggtctgtcggctctgatgctcaatgtccgtcacgcctgagctgagcatcagaccccgtctcccgcgacagctcaacacttgttcgactcgttccctcccgggtcgttccctccggactacacgcccgagaaatatgtcgctgagcgaaacgcgcttcaagacgcttcctttagggtcgtccagccgttgccgggcgcggtcgagctgctcgagaagctcctgaaggccgaaattccgatcgcgctggcgaccggcagcacggtcgagggtgtcgccctaaagacggtcggtcgacttacgtctctctctccctccctctgctccatttgagcctccgctgacgaggtgttcctgtcgcagtcgcatctcgacatcttcaagcactttcacccgcacgtgcttacggccaactcgcccccggtcccgccggcgacgcggccgacaaagggcaagccgcatcccgacatcttcctcgcagccgctcgctcgctcggcttcaacgtcggcacggaggaggagcctgccaacgacgacgagcggcgagagcgcgcccggggcctcgtctttgaggatgcgctgccaggcgtcgaggccggcttacgttcgggcatgcatggtgcggcctcggcctcgctcgctcacaagacacgcgccgctcacgcagctgaccctgtcgagaccctccctccctagtgtgctggatcccggatcaggagctgcgcgagctgcacccggccgacgacaagggcgcccatcaggtcctgacgacgctcgacgggttcgacctctcggtctggggcatctgactcgttccgtgaaaatccatgtagacgtcgagccggacctagcgacctctggaaggaggcggttcgtcgtcaggcgcaggcgaatcgctcaacgaccagacagagcttgggcatcgtgtcgtcaggccgttccggtcgaggaagcctccaacgaactcagccgggccagccggggcgcgcgtcatgcctcgaccgacctccttaccaccagcatttcttcggcagacctacctttcgcagtatctccttcaccatgaatctgctccggacagtcatctcaggtatgtaccgtttctcttatccacgacctgcctgccaggccgccgtcgctcctcctggctgaccttccgccggagcccggcccatcaggccctaagcagcgtttcgtcgataaagctgacaaccatgacctcgacctggtctacctgaccgaccggatcgtgctagtgcgtgctaaggcgttccgacgctttcctcgaaagtgctctgctgaccgacctcagcgcgcttgactgaacagatgggctgtgagcgtcgctgctgctgcggccgccgaccggtcgcctgctccaggcccagcttgctgacatgagatcgtccccctcgcagatccggctaccgggctcgaggcgatctaccgcaacaagatggtaaggtctctctcttgctcctactgctttgaacggcctcgactgacgccgagctctcgtccggccttccatcttcaggccagcgtcctcgccttcctcgacgccaagcaccgcgaccactatcgcgtcttcaacctctgcccgctggccgagaacgcctatgatccggtcagctcaagtcatctttgcgagtcatcatgacgacaatcgaagctgacggcgtcaagggcccgccagacctcgttccacggccgcatctcacgctatccgttcccggaccatcacgcacctcctctcgccttactccactccgccaccgacgagatggagctctacctggaggcggatgccaagaacgtcgtcgtcattcactgcaaggcaggcaaggtgcgcaggccggctgtagattgatcgctgtggccgccgtgctgatccgccctctgacgcacctccagggccggacaggcacgctggcctgctgcctcgtcgagcgactaggaggagccgaagcttcccagaagttgcacggcatgctgaacggcacgatcgccgtccctggtcgcaaggaggacccgcgagagctcgaggacaatggcgaggcggacgagggtggctcggtctcgcttccgccggctggatctcaggtctctgaggagcctcttctggtctcttccgtcgcgggtcagaaacagagctcgcaggcgccagaggtgaagcacaagaagcgccggtcggtggctaagcagccgactcctccggctgctcaccccgcagccgagacgctcgacttccacacgagccgccgcatgacgcaccccgacctgcgcaagccgggcgtgtcgatcccgtcccagaggcggtttctccgctactatgtcgactcgctgaaagcagctcggtctgagcaggccgggctgtaccctggcggcggtcgatccgacgagccaaagccaatgctccggctcaaggaggtcgtcctcgtcaacgtccacccagcaaaggacaccctgactccaaaagtcagaggagaagccgctcgctacgacgacgctctcgtcgccgacatcgaaggccgcgtggtggatgcgcttcgggcgagcgccgatgaggacacgcctcgcaaggccgtcttggacggggccggcgggctcggcatcggcatgagtggcgtcggctctgacgccatcggccacgaggacgaaaaggccagcatcggcggagcgggcatgatccgctcactcgcgccactcagggaggactacaccgagacgggcgagatggcttgggacgacttcggggagcgcagcaccgacctggtgagccgctccgtcgttgcacttctgagacgcggtcgctaactgctgctctgcttctccgtcaggcaatgtgcacgcaccacctcaagccggagaacgagctcgtcgttcatcctgaccggtaagatgctatgcttttcgtcacctgcgtctctcctcccactgacgcccccatcccgttctgacccgcagcgagctcaagattcaggtctttctcggcgccgagtcgcagcagagcatcaagagcaagccttccggtctcctcgcccgtggcgttcgcagcggcatcatgaacgtcttgctcggccaggtacgtctgatctctttcagtcaagcactatccgactctgaccaacttggccttcgacgttgtcactgcagagcacgtcgtcgctcggctggctctggctcgtcccttcgtttcacattctgtcgctctcaaacccgtcggccgacagcgtgccggcgacgggctcgcggacacacacgctcacgttcccgcgcgagattgtcgacttccgctcaaagaccctgcggtccatctcgctcgtcttcgaggagctgcccgcgccatcgccggccccttccgttttggcaaacgattcggccaggcgcgcgtctgtcggcaaggcgaaaggcgagaaggtgcccgatgacgctcaacgtgtgaaggcagaggagggcgggctcgaaggtgccgagagcgggactgagtacaactaatgaaggcgcctccttattgtcatcgtcgatccgcatgttgcaccttctctcctcggtcgatgagaaggcgatgccagggctggtagcgagcgacccgagtatcggacgaatcttgagcactcgtccctgtcagtagtccgatcccgggtgctcggcatggctcggaccgagtgatgggctaaggccgagatgcctgcaaggccgacagacgaccggccaaaaggggctgccggtcgccgcgcccgccttgagcagcgtcgagcctcgccgtctcgcgccgccctgctccctctctcctctggtcctccacgcccaccggcctccgagccattatgccgcccaatccagcagacgttgtcgatctcgtgcgtctcacctgctcttgctgcctgtcgcctcagctgaagctcatctttatctgcgtccatctgctcgcagtcgaaggaggacgacgaccttccgctcgccggtcccggcccgtcgactgctgctgccgccgcagctcgtgcccgcaactggcggcacaagcattcgattgaagtcgtcgagcttagcgactcggacgacgacaggcctcctcaattcaaggcttggaggggtggcagctcccggaacgcagcggctcggtcgagcaggtccgtgcttgcctcgcctgcctcgtccctctcaagccctctgccgcatcttgccctggataacaaatcacccttcttattctgaagggacaccatgatgcgaacgcgcttctcctcggtcgagattctcgacgacggcaacgacggtcgccaacaggacctcgctttggcggcctcgcttccgtaccggagcgcaccggctgcgcgcgacgtcgactcaagcggcccttcgaggcaaagcacctcgtcagcccgcgaatcagcatatcctcacacgaaggcaggccagccggaggctgcaagactcttgtccgccgacccgctgctcaaggcagcacctgccgcagacggactggcgcagcttccgctcgcggctcccgcgccagccgaccccccggatcctctagggtctcattctgcaccggccgaggcacccggagagatggcagaagagaccctcggtccgattctggcggatctcacgcttgtgttgcctgacctctcggttgctcgtgcccgggccgtcgtcctctcgctatggatcgaaggcctgcgcggacgagcagacactgtcgaccgcgccatggacatcctcttgaacgagcctgcagaagatgcgccggacgcttcgggagatgaagacgaggctgcgcaggacgagacgtcgaatggagcggccgaccgaggtcccgagccggacgccgaggcggccgggcctaacggcagcgccccaccgtcatcacctgggtcggattcgacgatgcagctgctcctgatgctgccccttatcgagccggctttcgcgcggcagacggtcgacgtcattctcgccacaggcttcacctcgagcggccagatcctcaaccaggcgatggacgtactcttcgcgatgcccaagggctacccgaaagcggccggcagcggtaagcgcaagcgggccaccagcgagacgtctggcgatgaggccaagggcgaccccggcaagaagcccaagacggttgatcggaccgactatggcgacgctcggcgccagcgcggcctcgtggcaaactccatcgacggcaaggtctacgacgagctgagcattgctgcacttgtcgaagacttcggcctcattaccgtcacgcagtttgtacttctttccatccttgtcgctctctcttgccaccggctgacgtcgctgtcggtcgtctgcttcccagtctgcgaaaggtgtttgccaagacgcggctgtttgcgccgacctatctctcggtgcggcgtcgacccatcatctctcatcagctgacctgctcaaactaatcttggccccattgaccgtggcagatcctcgagcagaccaagatgaccgagaagccgtacaaggagaagaagacgccgaccctcacaaagggcaaggaccgtcgcggcagctgcgcagagtgggagcgtgagaaccagtggctgcggcagaagctcggtaggtcctgtcgcaattgtctaaggccgtcgcgcactagctgaccgccgcctttcatgacccgcctgcagccaccgacaccgctcgacgtatgcgagagctcgccgaggccgaggaggagcgtcaactcgaagagtcgggcctgggactcgaatgtggctgctgctttggcacggtcgccttcgagaagtgcggtgcggcgcatcctgtcctcggacacgtaagacggatttggactgacaaccgtccgacctcgcaggcgcgtgtggtgagggccatctgttttgcgtcgactgcatcggaggacacgccaagaatcagatcgggagccagatcgtcgaggtaagtttggttccagcctgcctgatccgcgctcgaggagtcggccctcacaccctatctacccttcttttagatcaactgcatggacacgagcgggtgcaaggctaagtttcatgagtcagagctgcggcgcgttctgccagcgcagctcatcggcctgtctgtcccttttgctttgccgcgtgccaaacccctccgagacctcactggttgcttcgctgacgctgcgaccttcctttggttcttctgcgccttgtctgaaggtgggagcggcttcagcaacagaagcagatcgccgctgccgggctagccaatctcgtcgcctgcccgttctgcgactttgccgtcgagatcgacaattcagaggagaagctcttttgctgccagggcgccgagtgcagcatcgtcagctgccgaaaatgccagcgcgaggaacacctgccccgcacgtgcgaaggtcagtcggccgactgcgcttgccttgccttcagtgtcagccaaaatcaaggctgacagctctcgctcccgcatcacttccggccgcagaggtggctgcggaagacaagctcgaccaccggcatgctgtcgaagaggctatgacgcaggcgctcatccggtgcgctgattcaaccgagccaacgaacgcagacgccactgtccgtcgactgctgaccttgcgactctttcttctcggtcctgaccaacgtgcagcaaatgcccgctgccgacctgcggcaaaccgacgacgaaggagtctggctgcaacaaaatgtcttgcaccgcgtgccgtacgtccttctgcgcaagactcgagagaaatcgttcgctgactggacgagtttggccgcccaaaggcacgatgttttgctatctgtgttgcgcgtacgtccgaatctcgagcttcatctacatacgcccctcatctgcatacgctacccgcctggttcctgatcatgacctcgatgcagtatcataaaggattacactgtcggtcctctctcacgtgtcatggctcgatttcgtcggctggctctgacacgtctgtgtcggctcggatcttgcagcactttgaccagtcgcctgccaactacggcctgccgaagaacaaggccaagtgcgtcctctgggacgacctcggcgaccggaccgagaaagaacttcttgcggcgcgggagaaggccaaggccgagctgcgggagaaagggatcgaggtcgacggctcgatgggtgagtctgaagccactcacccttcctgcactgcagatgggactgatgccgctttcccttgcagacgtcgacctgccacagcgggtaccgaagcccgccgctctaccactaagggctgcgctggcccggccgcctggcaatttggccgcggcgcagggcctgcatcccaacctgttcgctgctggcctgtttcccaacctggctggcggtctgcctttggggctggcggcggccctgcctggcgcctacgctgggctcggccaaccgctaggagcagccccgaacggcgtcggaggcttcagagcgcaatacctcgccgccctgaatgcccagcagccacccgccccgcccagacccgcccagatgcccgccgcacgtcctgctgcgcctctgcccggacgcggcgcggccaagaagaggcgctgaaggtcgctacctgctccatcgcctcgtccggcctgagctcgagaaggaatccatcatatgagctctactcggccctgggccacccactgctcgaccatgccccatcgtacgagatgcgtcgtgcccttcgcaaagtcggcctcgtcgcctctgccagccaaaagcaaagaggaagcgtcagaatcgcgtcagacgttccgaagcggtcgaccaggtacttacgacggcagccgacgggggccgacgtcttctcgacagtagacaaagacggcttgttccggatcgggtttggtgactgggagggggcaagcagagagtcagcacaaagggggtgccaatcgcagcggacccacacactaactcatgctcatgccgtcgtttgacacctcttcgaggtcacctagacgctctggtaacgagtctaggaccgacgctttcatgtgggcggcgacgagtgcttgaaacctggtgatgtcgggctgaggctcagtcgtctgccgtcggccgcaagagggcgaagacaggtggaaccaacttttgcgcatgcgccagctctaatggcgacagcaagggctgcatggtcggtgtcagggcgatgagctgcgcgtacttctcgatctgacgtcgaggaaggggcggaagtcagcaaggtcagccagagaggtgaagcggtgcacggatcgactgcaccttggcgagtcgcgtgcgtaggtaagaccggacgagatactttgcgcgctcaatctcggtctgaacgagcatcagcttgaagtgctcctcctcgctggtcgaggcctcggccaggagcagcgagaccatctcgcgctgaggtcgagacggaaaggggacgcgcttgtcgtcagtcttaccggcgaaacttacggtagagccgcaggcgacgacagacctgctgttcgacccgccacatgacgccgtcgacgaggtcgtcctcccagcgcaggattcctggtgcgctccgctcgccgacccatgcccgcatgagtcgggcgacgtccgtctccttctcggcctcagctgcggcggcggccggtgggccgtcgtcgggtgcggggagctcgtagtccatcggccctccggcgccagcgtacagtccaccagattggccgtccttgtcatcgccagcaggcgaccctagtcgaggcgctgcagctgccgagcgaggagctgcgtagctcggcgaggctgcgacgcgactgggctcggcgcgggcgggcgaaagcgcgtcgtcgctgtcgtcgtcgtcaaagaagctggccatgtcggagggtttctgctgctgctgcgagagagagcgggatgacgacagcggtaggataggcgagcgacggcacagggcaaggtcggaccgaggttgctgaacgagctcgtgcagccgccgccgagcttcggagcgtcttgctggtcgaacgaggtcgagcacgagcggcgcccaacaccgaccctctcttcaccttcggcagacttggcacgacaccgctgcactcgtcgagcacccacctgaagcctgccgaccatgcccgccatcgaggagtatgattcggacgagttgtgcgtcaaccttggctttctccttcggccggcctctgcctgccacccgagctctcgaccgacgttgccccctcggcaacctcattctgatcgccgcggcctttcctttgacttacagcgacgatgacaccgacctccctttaccttcggcacccgttgctcgcgctccttctgccagtccagctggtgccgcggctcaagcgccggccaacccgatggctggcttgcaggcgatgatggaggcgatgggagctggcggtctcgccgacgaccctcggatgggcatgggaggcggcaaagacaagaatgtgacttacgtcgaggacgactcgccttacaaggagtcagtttttctgtcgtacggctcaaaggtcgagcaagcggcctcgacggcggaattgctgggctgaccttccgcgccccgctctcgacttccttgtaacagctggcacccaatctaccccctgtacctcgatgccaagcgagcgttcggtacgaacggaggccggcgcatcccgcgggagaaggctcactggtggccgctcgccaaggacattgtgcccgcgctcaaggcccttcggctgcccatcttcgtcgaggcacgtcgccatcctccttgttccctttcgcgcctgacatcctaagccgcatctgacctcttcacaggctcacaagacccatcccaaggactgggagaaccctggtcgggtcaagaccgagtacctgagggacggcgagccgatcaatgccaagatcaccaaccgtccgtcactctgagctgcgggccgtctgaggcgtgctagagcagccgactgacaccagatcttctcccttgcacaggcaaacagctgtatctcgccgtctctgaggaaatgcaccggcttggaacgtcagtctctgccctccgaccggccgcgtcggtcaagaaggaccggaccgagcgcctgacagatgcgacggcgacgacctcggccgtgaagggtcccgccgctcgcggaacaacgacgtccggtactcggaagcgggcggcacgcaagccgcacccacacccgacgcgcgtcgcccggccaccgcagccactgccggcgctcgagaagcgcctgcccgagatgagccctgcgctcgccggcggccatttcctcgacattctcaagaacgagtggacgtgtgagcaggaggcaaaggcggccgttccggtcacgagcggcgcagacgatgcgagccgaactgaagatgggccagcgagcggcgggaagaagaaggacaagaagcccaaggtcaagatgatccgagggggcaagcgctaaggcggaagcgatgcatgaccttgcgcaggtggatcgccgttgtggcttagggacaggtcgcttcactttgcctggagcgtgcgcgatccgcttcagcctgaccacggccggatccctggctctagccaagaacgaggcacgtcgggcgctccactggagccccgtcgcgagactctgaacacacgctgtccacgctgggcctaaaagaagtggccagaaaaacggaagcaaaacggaggggtacagctgataattgatcgaagcggatgggtggtccgccttctagaagtgtacgcaggggcgaggacccatgaacggggtgaaggaaacgtgtcgcgccgaaagtggtccggacgaacgccctggctctcacgaaggatgcgatagacaggcgaccgggccagcgcaggcaaaaggaaagggcgtgagtgccaggcgagaagaagagaggtgcaatagcgccgctctaaagcgacggccagccggaaccgatgacggagacctcgaagccgatgtcgcgcagcttgcgagcgtcaaggatgagccgaccgtcgaactgtcgtgtacacacaaggcagtcaaaagggtgtcagggagagaaggataggctccttcaccacgaagataagatttaaggtggggtacgcacaacgaaagccggcttcgacatcttctcaaagacagcctgccagtccatcgacttgaactcgtcccactcggtggcaatgatgacagcggcggcaccctcgcaggcctcgagagctgacggcgagacggtgatcttcttcttgtctgcgtgtggccagaggataaaatgccgtcagcatcgcggggaaagacagaaagcagtgtgcgctgacgaacaagcgtcaatgtcggtgcccttgcgctcggcgaggtccatccagatctggctctcctcaacctgggggtcgtagaccgagacgttggcattctcggcgaggaagttgtggatcaagttgatcgaggccgactcgcgggtgtcgcctgtgtccttcttgaaggcgaagccgctgaagaggaacaaggcgacggtcagcagtctggtgagctccggaaaggagttgcggcgcgagctcgagggacagacaggacggcaagcttcttgttcgtgacggtcgagaagagcgtcttgacgatgttgttggaaaagcggttctaaaagacacgaggggagcaagggcatcagccgcgcgttgacaccggatgggtgaatggcccaaaggcggccaaccttctggtgctcgttcatgtcgacgacagccttccagtaggcagcgacctcaggcaggtggaggctctcgctcaggtagacgaggttaaggatgtccttctgaaagcacgaaccgccgaagccgaccgaggccttgaggaacttggagccaaggcgcgagtccatgccgacggcgtgggcgacctcgtcgatgttggcgccagtcgcctcgcagatggccgagagagcgttgaccgaggagatgcgctgggcgagcatggcgttagcggcgagctttgagagctcagacgaccagaggccgacggtgaggatctgctccttcctgtcaagtagaaggacgaggggtcagctgtgtcgctggtacagctgagcaggtcaagggcgaagcgagagggactcacgggatccagttggagtagacatcggcgagtgcctggcaagcctcgagaccctgctcggtctgcagcgagccgatcaggacgcggtccgggttgaacaggtcggcaatggcagttccctcggcgaggaactcggggttcgagaggatgtcgaagcggacgccctcgcgcgcgttcgagtcgaggatcgtccgcatcgactcggccgtccggcagggaacggtcgacttctcgacgacgatcttgggagtagtcgcgatgcgagcgatctggcgggtcgcgagctcgatgtagctgacggagcgaaattggttagcgagtcgctcggaaaggagccatctcaaaacaggcgccagagcgaacgtacttgaggtcagcggcaaagcccgcgccgacaccagacttcttggttggggtctatcaggccgcgagaaggaaagagacgggcggtcagctcctgtgcactgtagacggagccctgcggacccttaggtccgcaaaaggcagctcgaatcgacacataaagcggtacgaacgttgacggactgcgaacatcacaggggagaaagcttggatcagcaggggagcgagccaggaagcgagctcgcgctgcgccgcgcggaaaagaaggaagcgcgcgccgcgtgtgctgagcggagggagaggacgcacgacaaagatgaggtcggcctcgtcgatagccttgtcgacgtcggttgagaagaagaggttgcggccgcgagcggcccggatgacgtcctcgagcccgggctcgtagatcggcagcttgaagtcgggcgagttccaggcgtcgatccgggcctgattcaggtcgacgatggtgacctggctggaaagaggacggacgagcctgagcgtgagcggctgcacaaggagtatgagcctctcgggaaaacatacatgtgcggcgccttgagggcaatgaccgaggcggtcggaccgccgacgtagccggcaccgactgagggagggagaggagaaagaaggacgagccggccggacgcgtgtcagtcgaggaggggaaaagcaaggacacggcaccctcgaggctcgcgccggagggaagtgaagccggaacgcactgcagcagatcttcttgacggtgatgggagacatatcaggagggagaaaagcgaagagaggagagaggtgtagggggtggggtcggagggaggagggacaacgcgcccggcaagaggagacgcgtccttccttcgcatcggcattcccgtgaggggagcgtaaccagacgtaagaacaaggcggtaatgagcgaccggctggtctcgttgtggcggcaccgacgcctcctttctcgcagaacagctttctttgctagagaaggaattacgaggcagctgatgacttcagtcgatgaatcttagaagagcgtcgcttcacaagccaactgctaaaggtcgacgctgcggcagccgaaagttcagccgcggccggcgggacttgtcgcttcgggccgcgccctcctgtgttgcacgaaggctcggccgggagtcgccaatggcctggaaccccatgtctatgcggctgacacccaagatctacgcacgccgctcctactagtcgctccgccgcgctctgatgaaagcgtccacgatccgcgtcgtcggcctgagagtcgtcgccgggctcagcatcgtcctgctcgcatacaacctttggtcggccaaggagttctccgtcgtccaggcctttggcggcggaccgcgttcgtcgccatcggccgtcgtcccgtcgcgaccgaggtgcgtcgacgcctcttggcgcgagcagcagcttgcctccgcagctgactggctgctgatcgctcacggcggcgcggcggcaggctccacttcttgttcccggcgacgatgatgggcccgctcggctgcaagtcgctcctctcggccctgctcaacaactttgagccgatcctcctcaactttggctcgcaacagtcgggcacggccgctcggctgctcaaggtgcgccttagctcgctcctgacaaggctgcctgtgcgccggctgatcccgaccgggcgacggacacctcgtgggatccaggtccaaggcgtgcgcgactacctcgaccgcaacgtgtccaacccggacgatcttgtcttcatggccgatgcctttggtctgtcgagggaccgcggctgcgttagggcttgctgcatcagctcgctgacatgcgcttgtcccgcagacgtctggtaccagcagccggccgagatcctcatcgaccgcttcgtgcgttgcgtccgctgctgccgcgctctgctgacggtcctgacactcgacacctcgcaccgctgcttctgccgctgctgtagatggaggattcatcgcgcgtcctcatcagcgcagacaagaagtgctggcccgagcctgccaactcggccgaatgcaacgacgtgccggagtcgccgctgccggctcaggcctacggcgagcagaccgatactggcggctggggcgacactgtgcgtcggcgggcccgccttagccaattttgttgcgcagggctgagctaatctggtgcgactgctccgctcgaatgctccgctttgaactcgtgatgggcttgacgcctcgcagacgccaacgacacagtacaaccggccgcgctgggccaacagcgggacgatccttggcctggcctcgcaactgcagccgctgtatagcaacctgaccgagctggcaaagacgcgcggcgccgagttcgacgaccaagggctcttcatgtgcggcccgctcggccactgacagcgttgcgcgtgtacagtgctgacaagcacaagctgacggccctttgcagaacctactactacaacagccccaacaagccaatcacccttgatctgacgtccgacttcttccagacgctcaccttttcgcaagaagacgtcgccttcgtcgcctcgccccacaacctcggctcaggcctgacggcggcccttcctagcttgcccgccaacccgcccctcttgcgcaacaaggtctcgggctcgctcccggtcgtgctacacttcaacggctacgagaagtcgcttatgacggcctcgtcaccttacgaaccctcctggtggtcacgcatgtggtacgtctcgggcggtccgggctccccggccgagcaggccgaagtcaaggcgtgggtgcgccggcgggtccgagcgggaggggccaccgtcgccgagacgggagaatacctcagctgggatgagcttgggtgcgaacgcgaagacgtctggggcgagctgctcaagcagtgatgaatgcgtcgtccaaagatatcgaggcggcggtgtgggcttacgtagagactcagcggccaatggacgctgcaggcggttgtaggggcagggacggacggtcttatgatagcctcgtagacgagtgtgctcatcacatgcgcgacgccatgaagaggaggccgaaaaggaggtggaggggggtgcgaggctgggagaagcagccaggatcggacgccgcgcggttaagcccaggacgacctgtcccaggacggatcttgcaggaacgggcagaggatgctgctgccagtctggatcaaaggatgaccggcaaccacgttgaggaatcgctgtaggccctcacgcctcgactcgaccgtttctggagtaaaacggttggtgaacaccttgccgggcagcggaggaatgttgacctgtaccgaggaaagcacggacgcacacagcggtcagcaaaaacacgttcgggaccgagacaagcagtcgccaccctgctaggtgccctctgcctcgggcggagggacaaggcaagcgatgccgagccgactgcgcatctctcagcttgcgacacgccctagctcccactaagcgcacccgcctattacgcgccatctccgccaatggaatcgagaggcctgatagccgaacgcaccctcgtgctctcccgctcgagcgtgtctcggaaggcctcaaagtccgagtagcggcggcggacgaccgagtgtcggagcttgaacgccggaatgttggtctagcgtcgggcaatcaagggcgcgcaaggccgcttgtcagccgggagatctcagcataatgtagaggcggacgaagaagaggcgcaccatgcagacaatctcgtagtcggtgtacattttgcggccggcgcctgggcaacgggcgaagcgagcgggagaggcgtcagccttcgtcctcgcgacatcatccttgagtggcctcaagtcgagcgaccacctacgtaccatgggtctgtggattgcggacctcaatctcgaggaacgactcgggcgcgccgtagatctcatcgagctgcagagggggggattcgggcgcaggcgccgagccgtcagccgcctgagcactgccaggccgctgctcgtcatcggcctcgtgactagcgctcaagtatgcgggcgacacgtacggtctgagcgcgctgaccggggaagtgcgtgatgtcgcccgaggttgcgcgctggaagggcgagtggtagggcccctgctggtgctgctggtgctggtgctgctgctgtggcggaggtccgcgctgttggccgccctggccctgatacgaggcagagggcgagggcgacgagggcccggacggcagctgggctggcataaaactcatggcgttgtcgtggctaggcttggagggttgggtgggcgtctgctcgagcctctacagacgcccgccgaagccgagatggcgggcgtcttggtggcggcggcggcgctgcagtctgccctccgacatcgacctcgcctccgcaccttttcctgcttcccttgctcgcaccaatttacagctcggccatgtcctgcctcatccgtggctccatcagtccgtccaagcgctcgtcgctcgcactctctgcactgcctgggtccatcggctgatcactctgctcgtcctcggtctccgaccctcgctggcttttccgaccccagacatcgacgagttcttcgccctctcgcacattgtcaacccgggcgagacaatctcgtcttcgtctttgacccgccggccaggtggcaagggtgccaaccaggcctgctcggtcgcgcgctcctcgggcgggactgtcacgcgtgcgtttgactgatgcttcgaggctggctgccttcgacgctcggcccggtccggccgagttcgcacgcccggctgacccgaaccgactttccgtcgtcaactcaacccccctccttttcacagtcgtcggagcggtcggggaggacggcgcttgggtgaaggaccggctcaacggctacggcgtcgacgtctccgaaatcgccgttgtcgagaacgacatcactggccgggccatcatccaactttcgaaggaggacggcgagaactcgatcagtacgtttctccagcgcttcaaggaactgcccttgtgccgagcgacgcctgacacttgttctcgcttacctgtacagtcctccacccgggtgccaaccacgcctcgctctctctcccgagcgcgctgacggccggaactgcgttcctcctgctccagaacgagatcccgcttgaacacaccaagcactatctgacgctcgcggctgcggccggtgcgagcgccgtcttcaacccgtcgccgatgccgacggcggccgagatccgggcgttcgagtggggcaagctgggctggctcgttgtcaatgagggtgagatgcaagccctcctcgcggcgctcccggacactcccgagtcggccaactcctcgtcgacggccgccgagattgagtctgtgcctgagaagctgcgacctttgcttcccgagctctatcggcttgcgggacatcctctccttcggtcggcaacgtcgccgccgggcctcatcctcaccctcggcgccgccggatccgtgacgctctcgccaagcttagctcccttccacacgccctctgctccgctcgagggctcctaccgcgacacgaccggcgcgggcgacaccttcctcggtttctttgtcggctcgctcatgcgcgggctcgacgtgcgcgaggctgtccggcatgcgactcgggcagcgggcatggccgtcgagcgcgaaggcgcgatggaagccgtgccgtcttgggatgaggtcgaggcccggttggctgccgacaccaattgagccataggttctcgacgatgaaagaaacttgcctttgaagaatccaccctgctgcaggtgactctcactcctgcctgcacacgacagacgtgagcttccgtcgggcgcacgcacgaatatccaaaataagtataaacagaacaggggacaagatttctaagccagatcgaagagggagcgaaggggggcgaaaggagcgtgttcaggcgggagccaaaggtggggtaagtttcaaggaaggtggatgggcagagggatcttgaagaggaggtggtgacaaaactcgtcaaagattgatcgagagtgtcaggtgagaaagcaggaagagatgaagctacgcgttcgacgcatagacgtagtagttgaagttgttgatcttcgtcgtcgctgtcgcatcaaagtgcaaggcagtctggcgtcagagaggagcgggtatagtcgagcgcgatcaagagtagctgctcaccggcaaacgtgaagccgctcggcgtatagtcgaggtaggtctgccggcctcggacaatcttaacgttcataccagcgcccgtctgaagcggggcctccaggcgagagatgccgccagggaccgtaaacgtcttggaggacgagcccgacgtcaggataacggtcgccggggcgctggagaagacgagcgcaaagaagtcgctgagtgggcgccgcagacaagacaaagtggtcagctgccggtcgtgcgctagtcggtctgccgcgcagaggagctaatctcactttgttaaggcgtactggctgcccggggcgccggtctggcctagcgtcggcggaccggcgggatcgttggtgccgacggcgcggttgtcgtgcggccgggccatcaggtagaccacgtcgcaggcgatagtcggatacgagcccgttttgaaggccgttgagtagtacttgttgacagcgaggaaggcagtgtggtcgaagccgtcgacccaagactgcgaattgggctggtcgccagcaatcgggccgatgtagtgcgactctccgtagtctgggggccgatggtggacagaggtcagcgctgcgacggggtgcccgtatccgccgagaagcgacgtaccgttccaggtgacctgctcgacgaagtcggtcctgtcgcgcatggcgacgatctgctcccagcgaatcgcgtactgccagctgtcagactggtagacccagttctctgtgggcggcgaacacaagcggtcagcggagcgtcaagacgcgaagatcaacaccaggacgacgtactgttgtacgagttcggagcgtagtggctgtgaaggaaatcaggtcagcctacacttgcttaagtgggcaactcaaaaggcgagacgtacgtaaagaagagaggctgcagcgaagggagagatggaggtggtcggtagtcagccaactgatgtgcagaggtcagcaggccgctcaacgcaggacgcaccgaaaccgcaggcatgtacgacttcccctgtaggcgagcaaagtagtccgagtccatcgatgtgttgatgtcgttcgtgtccatcgaccaggccgagttccagccgaggatgccgtcgacagaggaccagctcgaccagtcctggctgtcgaagaagccggggacgaagtagatctgaagagttgagagacaggcgtgtgagcgagacgcagacgtcgaggaatacaagccgccgacttacggggaagccctgggcggcgagcgtcgtcttcatgttctgccaggcggcgttgccgcagctctcgccagcaaaggtgctgacaaggatggcgttgttgtacttgtactggttgccgtggttgccgtacgtcttgacgtagttgagcatcggtcccatgatgtcgccgcagctgaagacggccatgtcgaaggagaaaaagagcttgaaggacgagccagcctgggcggccgccgcgtaggcgttggcgatcctggagaagccaagggctacgtcaaagaaggcgcctagctaaatgcagaggctcccggacgtactgcttcggctgatacagcgtgtcgctgccaaggttgagagcgaaggcatcaatgccagcttggtcgcgagcgatcgtgatgtcgctgagccaggtcgcctgggtgtagggaagcgtattgccgaccatgtggtgggagatgaccgacttgctgcgaccgcttgcgggagctgcgagaatcgtcggattggaagtgccgcctgccggacagccaccgggtcccgtcgactgcgatggctgcgttacggtgaggccatatagctgcagccggtagctgccaccacacgtccgcgacctgtcacccgggcaagcaaccgcttggcagtctgagtcggccgccttggtcccgatctcgccagagaggttgagcgacggcccgcagtagcactctgccagtcgccatcggccgtcgttcgagtagagtagagagagcgagaaggaagcaggaagggagccctcccgtcctccgcctcctcctgcggccccctctgctgcttcgcccatcgcccccagtctgccggacagccgcccgaattttggcggtctctttgcagcgggcgtacccaagctcaagtcgagcggcggcggtagtggcggaggcaatgattcgtcgccacctccgccgcgggctgcgccgtctagagcgcctgcgcctagcgctccttcccgaccacctccgcctcccagcgcgccatctcggccgcctccacctccagccatcccgtcggcggctgtggctccgactatgccagacggccggccgaacttgggtggcctgttcgccgccggcgtgcccaagctcaagtcgtctggcaccgcagagagcgcatcggtcagcaatgcagcgtcggctccagctcccccgagccggagcgcgccgagtgtaaccgtcccggccgccctgcccgacggacggcccaatcttggcgggctgttcgcagccggcgttccagccctcaaaaagacggatgctgccacttcgagcagcggtggtagcggaggaggagaccctccgaagccgaacctcggcggcctcttcgctggcggtatgccgaccctgaagaagtcgagcggcggggctgcgagcggcgctgggcgcgatgacagcgacgacgagccgccaaagccgcagctcggcggcctatttgcaggtggcatgccgacgttgaagaaggccggaacatcttccggtgagtgcttcctctactcctggtctactcacccttgtctgacgagttccaactctgccaatccaggtgctcctcctgcgcgagcgccgccacctccggctgcgccgccatcggcaccgtcacgcgcgccaccgcccccttctcgggcgcctgctgcgtacgtacgcttgaacggacgaacgcctgctcgcttccgctgacatttttctttcctgcaggccgccaccaccgccgccgccgccgcccgcgagattcgctcctcctcctccgagcaggccgagcgcgtgagtctttcgtgccgcgtctgaccggccgtgtgaggccagcgactgaccgcgtggccccaatcatgtagcgcacctcctgcaccgcctccaccgcctccgccgcctggacgaccgaatctacccccacctccgcctgctcggcccacttcgtgcgtctcaaacccgacaccatttcaagccactgcagcgctgacatctctccctccctcgtaaattgccagcgccgcgcccgcactccccggccgagcctcgcccgccttgccgtccagggctccgaatctgccgtcgcgcaacagcttgagcggcgcttctggtcgatcgatgccaccgccaccgcagcaggaggattttcttctcaggactgcgacgacgcgcaatggtgagtccaagcggataggagccctctgtccctgtgacgcctggcactaatcgatcggccctcacagctgctccaccgccgtcgctgccttcgcgcgaaccgccaacgcctcctttgcctggtgcgagatcgactcctccgcctcctcctgcgtcgcggtcgaatgcgactcctccgccgccgccagccaggccgtctccggcgtcgtacgcgtcaaacggtccgccacctcctcccctgcccgtgggtcgccacctggcgtcgtcggaggtggcgcagtcgggcggcggagcgtacgatgccccccctctgccgactggtcggccgcgagctggcagcgccgcagcgcctccggtatgtcctctctcaaccttgttgcagacttagtctcagacgctgattgcaccctctgctgcagcctcctcgttcaacgcctcctcctgcctcggcgccgcctccgccgcctcccggccagagcccggcggccttcagcccgcgcgcgtcgctcggcggcaccagctccccgctcgccccagccctgccgaaccaccttgcctcgctggcgccctcgcgccgcatctcgtcggcgccggcgacggccgcaccggcagaggaggcgcggtcaccctcgccgccgccgcacgccggccatctgacgttcccgacctcacgcgatttcccgccgccgcggccatttgagcgcgggcgggtgtacgagtacggcagcctcaacaaaaagggcggtggcgtcggcttcaacatcaatagctcggcctgaaggcggtcgaggagcaaaggtccgggccgcagcacccggcgagagaagaggtggaggaggctgtgggagcagccgaagggagggtggaggggctcagtcgctcgggcctgtcggctggcagggctgggcccgccaatgaacgacggagatgctgccgccgctcccaggcagatgtcacccgcagcgcaggaggatggaagggctggacgggcgtgcaccgcgaagcgaggccaagtcacctgcggcctggaccaatgtcgcgacggggcttccgttcccgtcacgaggggccgagttcggtcccgccccaccggtgtggaatcggatgagattgctgccgctgtcgacgtgcgtgcttcgcccctgcctccctcagctcagcgcagcggcgccggcgcgcgtcgagccccagctgctgccgtcgacggccttaaaaccccccactccttgtcctcttctcgttctcgcccacatctccttctctgccagcttctttaccttcgtatgtcgtcaattttgtcgcttttcgatagaagttgaggctggcaagctgacccgctgcctcctttcttaaacgactgcgcatccgccgtacctcctctccgacactgacctctctctcaccgcccttagtcaaccgacttcccttttcatctccctctctcccatcacaaaagtaaaccaccatgctcgtctctacctccctcatcctctcgaccctcactcttggatccatcggagctcaggccgccggttcgtccttccctccctgcattcattcatatctgatcgctgacccctacatttcccgtccctcaaccattttttgctgccgcagctctcgaggcccgccaggcgctccccaccgacctttctcccgcggccatctcgtcgcttatcgccagtctcgccactgtccccggcggcctcgagtcgttcgtatttcctttgcgcgcgttgatctcgttgtcgccttgggtcacggtcactcacatcgtcattccacctcgcctttacagtgcctctggcattctcgcttcgctcaccggcggcctagtctcgagcgccgtcgtgtcggccacgagcgtttcggcgtccgtcaggtcagttgctttactcactatcccgctttttctgcatcgacactcacaccatttggccttcttctctatcagctctgcctcggtcatctcgagcgtcgcttcaagcgccgccgctgccgcctcgagctcggtcgtttcgcaggcatcggtcatgtcgtccgccagccagtcgtccgtctcccgcgtttcgtcctcggccgccgccctcggctcgtccgctgccgctgctgcctcctcggtcgcctcggtcgtcggctcggccgtcgcgtcggctcgccctggctcggctgctttccccgaggtcggtgccggtaaggctgccgtcgtcgccctcggcgtcgccatgggcgccgtcttcatcctctaaggcataatttcaacaacaagaactcacgcaacagcatctcgccttccctctcgttgtacccgagcctcggactcaaagctcaatccctcctctctccagcaataaacgtcgcccctcgtctagctctctctctgatgtccctattcagcccagcccctcttattcgccggccctcgacgaagcagttcggcgcgactaatcaccaacgtcatgtccctccccctgagaggcaggctgaccccttttaaactgacgccatcgatccgtctttgctgtcgctcgctgttgacgccgctgacgcccgaaacgaggcctctcctgtcggtcgcgtcgtgcacccgcgacgtcaacacagccagccagtcgtcgtcggcggctgagtttcgtcgggttcggcccgggccggcgcgcgatcgcgtctgacgttggctgctgcgcggccccacgatgggcccgtctcggcgctcgggtcggctgagccttaatttccccctctggcgagcctctttactcgcctcttttccctcctcgcccttccctccgaccacatcccacagccagccctttcccgcctgctcttgtcagtcgctgcgccgttcccgttgagagagagcgtgttcttgaggcgtgctgacacgctctcgtgcatccccgcttcctcccttcgacaatgacctcctcgctctcatccctagcgcccagcccccatctcccttccctcaacctttcaaagatgctcgtctctgcctcgctcatcctctcgaccctcgccgtcggctccatcggtgcccaggctgctggttcgtcgctctcccttgtttctggacgcttgcctggcgtgccggcgccatgagcctgacgtcgtgcccttgccgcccccccgtctccagccgtcgaggcccgccaggcgctcccctccgacctttctcccggagccatttcgtcgcttttcgccagcattgccaccatccccggcgcggccgagtcgttcgtttgcctccatttctcaccgcagcatggccttgccgctgacagtctggtcgcgcctccctggcctgtctgctacagtgcctcccagatcctcgcctcgatcaccggcgccggcctctctaacgcccttgcctcggccacgagcgtctcggctagcgctgcgtgcgtcctcactgactctggacatacatttcgcccgcaaagctgacgggccgacctccttcccttctttcagctcggcctctgccgcctcgggagcctctgccgctcagtccagcgccgccgtcagcgcttcggccgcgcagtcgtcggctgcggccagcatgagcaacatgtcggccgccgctgcctcgtcgtcggctgccggcctcggcaattcggccgctgccgccgcctcgtccctcagcgccgccgtctcgtcggccctccctggctcgggcgccttccctgagctcggtgccggcaaggccgccgttgtcgcccttggcgttgccatgggcgccatcttcgtcctctaagcgcaacgttggacacgccgtctcgctcacttgacgagacccagtttcccgcctctctccactcgttgtacagacctggacactctttccgcttcactaaccccctcgctgcgttccccttacacacgagaccctcctccatctgtcacctccttcggcttaaaacacgatctttccaaggccacgcatctcttgcctcgactcgtcattgtcgctcattgtcgctcctctgttgcccgtccgcccatctttcgatcgtggcagcttcattcatgcagtggggagaggcgcgtgaacagggcgcagtctagtggtggtcgtacaacaggcaaggaagagctagcggtcgtagtgatacatctctcgaaggtaggccagcggccgctcagagcttgacatcctcgccctcgatgatctccccatcctcgtcgaagacctcctcgctcgtgagcatatggctgtcgtagacgggaacgtcggcgtctggctcgtgcttgtcctcgacttgcagcgacctgccgtcgggcgcgatcgtgatggtcgcaacgtcgccattcctggaaggcgtgcagtagaaggtcagcacggtcgttgccctcaagcgtctcggcaaagaaaagagagagagggacgcaccgaatgcggccctcgacgagcttgcgcgcgagcttggcgagcacctccttctgtaggagccgggcgaccgaccgggcgccgtacgtctcgctccagccctgctcggccatccacttgcgggcctcgggtccggcgtcaagcgtgatgcgccggtcatcgagtcgacgctggatctccttgagccggaggtcgacaatcgagccgacgacctcgtgcgagagcttgttgaagatgaggaggttgtcgagccggttgacaagctcgggcgggaagtgccgggcgacagcagcgagaatctcggcctgcgcattttggctgacgtggccgtcggcgtcgaccgcgtccgggccgttcatcgcctcgctaccgagattggacgtcaggcagaggatcgtgttgcggaagtcgacgacccggccagacgagtcggtcagcttgccctcgtcaaggacctggagcagaatgttggacacctcgcggtgcgccttttcgacctcgtctaggttgatgacggcgtacggccgccggcggacggcctcggtcagctggccgccctcctcgtagccgacgtagcccggggcggcaccgatcaggcgcgagaccgtgtgccggtcgtggtactccgacatgttgatggtgacgagcgcgttcttctcgtcgtcgaacaagaagccagcaagcgccttggaaagctcggtcttgccgacgccggtcggtccgaggaaaaggaaagaggcgagcggccgctccgggttctgcaagccagcgcgtgagagccggacggcgtccgagacggcggtgacgacgtgatcctggccaacgacgcggttcttcagcgagtcctccatgtggatgagcttctccttctctcccttgaggaggttctggactgggatgccggtcgcccgggcgacgacgttggcgacgtcctcactcgtcactcggtcgcggaggacaaactcgcccgcggtcgcgctctcgttcgagtcggacgggatctgcgactggagcgtcgggattcggtcgtaccgcagacgcgaggccgcctcaaagtcgccgttacgctgggcgatctcgaggtcgatcttggccttctcgaggtcctccttgagcgtcttgaggttcttgagccggttcttctcttgcatccactgctcctccttgccttttgcttcggcctttttgcgcgtgagctcgcgctcaacgtcctccttgcgctcgaccgagaatgtgtcggtctcgttcttgagcgactcgcgctcaatctcgagcgtgacgatgtcgcgctcgagctcctcgagcgccggtggcttgctctcctgggcaatgcgcagcgccgaggcggcctcgtcgacgaggtcgatcgccttgtcgggcaggaagcggtccgggatgtagcgctgcgagtagacggccgcggtcacgagcgaggcgtccgagatgccgacaccgtgatggacttcgtagcgcgacttaagaccgcgaaggatcgagatggtcgacgcgaccgagggctcctcgaccttgacgggctggaagcgccgggaaagcgcagggtccttctcgatcgtcttgcggtactcatcgagcgtcgtcgcgccgacgagttgaagcccgcgcgcgagcgccggcttaatcatgttgccagcgtcgatcgagccttcggacttgccgaggttaagaagcgtgtggatctcgtcgatgaagcagatgacgcccccgccctcctcgtcaatgtccttgagcagcgccttgaaacgctcctcaaattggccgcggacgccggcaccggcgagaagggcactcaggtcaagcgagaggacgcgcttgttgagcagcgactggcgttaagcgttcggcaggtcagtcttccgtcgcagcctgtaggcggttggatcccggcggaacgcacctcgggcacctcgccgttgacgacgcgctgagcaaggccctcgagaatggctgtcttgccgacacctgccggaccgagcaggaccgggttcgattttgttcgccggctgagaactggcaggtcgcaggcaggtgtcagcgagcgcggaagcagcacgttgtgtcaaaactccgcttgagcgaacatactctggatggtgcgcttaatctcgtcttcccgaccgatgacggggtccatcttgccgtccttggcgagctgggtcaggtcgatgctctgcgagacggcgtcgtcaagcgacgaggtcagcgttgctcattcagacggcaggcaaggtgatctgctgactcacgaactgcttcagcgcctcgcccttttccatgccgcctccgcccatcgggcccatgcgcatgccaccgagtcctccgccgccaggagccaggcggagaacgcccgtgctgaaggcgcgctggccttgaagctgggcgggcggagaccttgtcggctcacggacgggtgagccagatcgagaggaaaggtggagggccgcagctgccagcgtcggcggcggcgggctacggagcaggaccggtcggagggcggccggtgagcttcttgtggacagtgagcggacaggcaggcgggcgagcatgctggcttcgtgtctctggtagagtttgtggcagagggatgttcgagtggccgagggtcgctttgtatagagctcgtggcggtcggaggcgaggccagctggaaggttcgggcgagctcgaggagcgaggcccggagcagccctcctaacgcccacctcctcctttccctttccacgaacccagaagcgcatctcatcccagcatggcgagcagagtccccgtcggagaggtcacccaggaggtacggcccgagcgattgtcgcgcgccggcagaggggagccagcgagatggccagtcccgccgcgcgcccggctctccctcttccttgccgagccgaggattgatttgacgccctgctctcgaccggctgtccagtttgccgacggcggcttctacgtcaagtcgaagcttgagacggtcgctcgtgacattctcaacgatcagtatgccaaggacgaggagcacaagaaggctgaggccgaggcaccggcgacagcgcttaaggaggaggacgtcaagtacctcgtgcgtcccatggcagcttctgaagcctgcgcccccatctgcccgcatactgacttgctcccttcgttctttagattatcgagctcgagatccctcgctcggatgcggagaagtcgctcaggtcagcgaacggcgacgtactcgctgccgctaaggcattcgtcggtctgccgaccgctggatcgtcatgaaggcgtccactgtgtaaaggaagcgcgtttagagttgacacgaccaggagggagaacttgctgacctactgatccttgctgaagcgtgatcgacccggctagtcttacggctgaccactctaacctgtaggcgtagtcctcgccgagctctgttgctgcatgcacgaccacagtcctacgagtcacccgtaactggcgtatgctcactcatcggagagttttccgaaggcgggcgaaggcgggctggaacacgcccctcgagggtccgggctggttcccgagagcttatgctctgtcgcggctctcctgtcaccgacgctctcgtctgagcgcgcgcctcgcttcgcgtgtgcggcctgggtcataagatatcgaccagcgtcggcttgctgcaggaagccgtctctgagatccttgcggcaagcctcgcttgtcatcgggagtgtcgtgctggcgcgcagccgtcggtgagcgactgccggagtgtctgcaagacgtacttgtccttacagttctcaactggctgccatctgaccgattgccagtccttggaaggatatgatgagatcgctgcgagttgaggccagatggacggcgaggtctcagcaggattagcagcgcgagcctcatctacggagacgcgtcggctcgtcgtcagtcgcgtcctccaacctcgacctgtccctccgacccttcctccccgccctcgcacctccccttgacatggcgccttcagcttcagcttcagcgacggtgccaatcagctttcctccggcgtcagatccgaccaccgcgcatgtcttgctcgagcttccgccagagctgctcaagctcctcgaagagagcgagtgcccgccgtcgtccgtctgctcctctcggccctcatcctggcgacccgttgctggtgctgacacatcctccacgcctagcctgacgatcaagggtcgaccaaacgactctgccgtactctgcacgccgaccctgacctacgcgatccggacggtccagatatcgaacgagctcgtcctgctcacgccgccgctaccgccggcgccctccgacgacccctttgggccagaccccccgccccgcccggccggtggcgagaaccggctcgagtggcgcgagactcttcacgaggtgctcgagctgcagcagatggtcccggcgatgggccgggtggaggaggtcctcgccggccagcgctggggcggcatagcaggcgacgaagcggcagacgacgacgacgacgcgagtgaagacgagccggaaggccggccagtacgtcgctcatccctctcgatgcagcgcttcaggagctgatcggctgcctgatcgtctccgcagcgcaagcgcacaaagtacacgctcgagcatctccggtcaatcgtccaagcgtcggacggtgagctcgacgctgcgctccgggcaaagaatgttgtcaccgtcaaaggtgcgacaaatcgtggatggctgcccgccggcactctcgcctgaccaagggtggggctttaacacgtctgcaggcaagctcctccctcttccgttggcccgcctgccaccgctcctgtcgctgtgcttgtcgctcctcgtcatccacgcgacgtcaaccgtctcgacctcgagttttccgatccgcgctccggtcgggctgatactcgacggcctgcgcgagcagggcattgacaacgcgctcggctgcgagcttcttgcgctctacggtagcgtcgctcggaaaggagccgcggactctgaggaatgggtgctagagatggagggcgccgagcggatggtccgtgagaccggccgaggccttctcatgaagctcgacgtgcgttggccgacggccctgtattacgaccgtctgtgcgccaccactgatcggccttcttctcctttccacaggcgcacgagtcactgccgctgacggcgtttgagtcgcaatggcgtgggctgctgcccgactcattcacctcccttgccgtcttgactctgctcgacggcttctacctgctcgacccgccgccgctgccagcaccgtcgcacgccgtcctcttgacgccatacccggtctcgcgcctctcggctgtcgcgcaggaccgcttcgccgagctctttctcaagcggtcaaagtggcggatggccgacctcaaggtctacctctcggaccttggcacgggcaaggaagtcgagaagatggtcagcaagtggggccgtgtcgtcaaggagcgcgagacgctcagcacgcgcgtcaagggccgcatggtccgaagcgaaggcccagtcgtggaatgggtttactcacgcgcaaggtagcagcctgcccgatcccatgccgctgagacgatccagcaaagctcgcgacgctggatgcaagactcatggatgaccgacgtcgagcgttaccttccgcccggcgatcatgctcagctccccctcgaggaggtccagtagcaagccgttgtcgcgcgcattgaaccacacccggcgctctgccgaccaattgtagcgcttcgggccgctgtagtggaacacgtcaaaggtagttgggtcagctcggcgatctcatcccgcgtcgaaaagaggcagagacgcacgacgtcggggacgagagccagatctgtttgttgggcggctgcttgttaatgacgtacgtccccgagtcgccgaggttcagcgtcaagacgcccgactgttcagtcgagggtcagaaggagccagtcagctttaggcgagagcgacatgtgggagcggacaccctgcaggccgagagacgcgctttcttgcacatcgactcctgcaagcacccgcggccatcgcagcgcacggagcaggttcagcactctgctgtgttgcctgactgcttcgtgcggccttcctccagccctcttcagcagcgagccgaagcagcacaagcgactcacagagtactcgacctcccatccgccatcggcgccggcgtcgccctcgacgagctcctcgagcgagtcgtggagtgcgtgcattgtctcgtccgagataggagcgtactcgtgctctgtgagctcactgctcgtagtttagggcaggatcgcatgtcagccgaggcacgttctgcgagcagccgaggtccgcccagggaccagtagacgaggacgagggcgacgcacgcgacctggtacgacggtgaccgccggaccgactgaatcgagaaggctcggctgttgcctgcgaccgagtgactagccaggacaagcggtggccgcgagacgcagcccgagataggccgggaggtcgctgcgatactggcggaggggtgggcggcgagcgccagagctcgcccgctgagtccggccgagttgagtgcggaccaaaggacgacacgagagctggaaggcaggcagaacataatggacgcaaggctgaagcgtgaaggtgggttggagggaaggcgatgctggagcgagtgatggtcgggaggtcagctgtctcgctctcgtgctcgtgctcgagcttctgctgcagcacgccagaggaacacgacctgacgggtcctaagctgatgaacccgagcaaacgagcaggagtcgttggcgggaagaccgcagacaggctggcggacgcccacgcaagagggaagatcaggcagaggtcatgacagacgggcacgaaggcgctacagcaagaagaaggggagggaagaaggggggatgtcccgtccaataggtgatctcagttcctaccgtccatcctgtcgtcaggacgtcacattgattgttttgaaggacggcgtcctcctccgacctgcccggacgaccgtgcaacccgagggccacggcacgagccagagcaaggccgtttgacagcaaagccgaggaggtttgaagtgctagtctggcctggttgtctggatccagacgcctctgctggccacagatggcatcagagggacagcgagctgcccttccgacaccaccgagcccggggacgcggacaatttgccgggcggatgagagaaggagaagacgcggccaaaaacggcggccgccttttgaaggggtcgcctcgatgcgctcgtgcggggagacagctccttctgccgacttgcatcagccggcttgcagggggggtagaagtcgactctcgcgcaggtgcgagcagccttgagcgtggtctatgcaaaaggtcatcgtctgtggccccccttggtcgcaccgctcacttcggcgggacgtacggctcgataagcatctgcgcgagcgggagggcgtcagcgttgggcaaggggcagggcgcgccgtcgtcgtcgcctgacctttgaaaactccttgatcttgtcggcgccgcggacctcctccgttttgagcgggagcttgacaatgtgaaagtcggagccatacaggtcgtaggcctcgagcaggtacttctgctgcatggcctgccgcaccgagcagtgctcgcagttggcacctaagcgagcgagtaggccatacgcgtcagccgtataatggacgacagcggagcgcactcgtctgacgcaccctccttcgggtagagcagctggttgatgacgatgcagtgcgtgtcaatctcgtagttggtgagctcctgcacgagccgctccgtctcgtagagcgagaggaactcagaaatggcgacgcagacaaaagtcgtcttgtcctgtaggagaatgcaaagggggaaggtgtcagccaagcgaggtttctatcgatgggaaactggaagaaggcggaccgggtcggtgaactgctggttgacttcgttgatgacggcacgcatgctctcgagcttcgcaaagaggtcctcctgcggcgctccgccaccgcccatcatgctcgtcatctgcggcgcaaggggcagacggccggacacgacaaaggaaagaggcggaatgagggggccagaggcgggtcagctgattgaggtacaggcaaggagcaagcaatggcgagccgccgcgcgagtcgtccccccaacaaggaacgtacctgctggatcatcggcccaaacttgccgccgagcgtcgcgagcttgccaagcgccttctcaagcacgctcgggaacgagaggaaccggagcgtgtggccggtcggggccgtgtcaaagacgatgacctcgaattccatcgacttgacgtgcctttatgagcgagagaggagttagaaaggggttagtcttgttacgagacagcaacgcacggaaccgcctgcacttcatgatctccgcaaagcccatcgcctcgtcgacaccggggatggcaaaggcgagatcctgcatcatgccctgcatcgcaccccctcctcccgcgctgtcggctgttttggtgagtaaggagaggtcaagtcagtcagaggtctgataaaaggctcaactgcactgcgcctcctccttttgaccttgacaggccgcggcaggccggcggcagaggagcagctgcaacacctccgagtgcccggccccagtctctctgcactcgagctcgccttccacaggcgccctagcgagatttggatctccccgagggcggccagaccagcctgtcgcaaactggagttgcgcccagcacgcgcgccccgagacgaagcctgagcggcgagcgagcaagaaccgacgcacacgactcgatcatctcctggatgctccccgtcgggtcgatctccattgcgtagaggttgtcaaagccgttgacgagcgtcgcgtccttgttgaacttctggccaaacgcatccgagaggttgtgggctgggtcggtcgagatgagaaggaccgacttgcgacaggcggcgagctgcgaggcaagcgagcacgaggtcgtcgtcttgccaacgccgccctttccacctgaggtcaggtcgcacgagagcaaaggggccggagggcaaaggatcagcgtcaggaggcggagggcggcgaagaaaggcgggccgggggtccggtggaggggtgaaagccgttgaggagggacggaccgcagaagatccactgcggtcgatgagcgaagtgcgttgcctgtcagacgtctggccatggaaagagcgggcgggacagaggttgggcgcaccttgagcgagcgctggtcgaggatggtctggagcgagggctcgagcaggtcctgctcggcgaggacgagctgctcggctagcgagggcgtcaaggtggcggccatgaagacgttcgaggcggacgggacgaagaaggggtcgcggaaggagctgtaggtcttggaactgagaaagagagtgtgtgctggtagagagcgagatgacgggctcgtcggctggcctccggcttgcctgcggttggtgtcctggctgcgggcgtcggaaggttcccaggcagccagcctcgccggggtcgaagcggcagacgtttggtcgggctggccggcttgctaccctccctcaccacccacctcccctcccagcgagatgttcccctccgacttcctcccagtcgtccagctaatcgacaaagcggctccttgaccctctttaccctcgcgggctacgcgggctttgagaggcggcgaccatcgaccatcgatcggagagagcacctctctagctaggtcgctttgacccgtcggggcgctctcctggctgctcagctccacaggccgacattcttgcagttctctgggccttgcgactctaaacagcgctgggctatcggacagtctgattcgggctcccagatagacggcggtaggcccgacggagctgggccgggggaggcgggctggcacgtaggtcttccactgtcgccgagccctcccggccgcttgctgcaagctgtgaggccgttgcaagctgtcgagcttcctcatacgacctctgcctgttccacgctctgctgagctgagggagggctcgtgcctcatgctgtcgagagggacgttggctggtcgtgtggaaatgcagatgcgagttgggccgctctccatcgctctgtcggcgcgacaaccctaggtcggggcgagacgcgcgcgcgcgccgaaaactacaaaggctcatcggccgttttctcgtcggcccttcttgcgaacgtcgtcccccgcccagccgcgcgcagagcccaaaccccgcagtgcgtcccgtcgcgtcccctcaccctctgtactcgtccaacgacgcgtcacccggccgccatccatccatccatccagaccatccagaccatccagccattcagccagccagtcagcctgaccgcgcgcatctcctctgcctcttcagcctccagtagctcgcaaggcgccagctctgtctcagaccgccgcgcttgtacacatctctcgaccctctcttctccctctcataccccgccccgcccggatggacgtcgacccccaacctcagcagcaggagccgcaacagcagaagcagcagtcgacgccgatggatatcgtcggcggtcgagacgccgacccggctgctgttgccgcgctcatggactttgccggcgcgcctgccagcactttcccgcctgcgccgccgccgccggccgctgcctctccagctccgccggcgccccagcagcagcagcagcagcaggacacctcatcgctcgcccacctgctagcgagcggcccgccgccctcgtttgcaagctcgggcccgcccgtggccgccgctgttccgcccttcgcgccctcaccatctccggcaacggcgccgacggccccgccggcgcttgaatcgtcgcttccaccggcaccggcgccgttcgctggctcacacccgcttgcgcctccgcccgagccgtttgcaggcatccagccgaccgcacctggcacggcgttcgacgcgccctcgctccctcctgcttcagagcctgtcgtcgacaccttcccgtccacggcgaatggcggcgctccccctcctcttcctcctatgatggaggcgaagatcccgcctccccaaccttcgacgcatccagcgtcgctcaagcgcgactcgcccgacaatgacgagggtcccgtctcggccgcgccgccgccgacgcctttgccggcgtcgggcccgcccgctggtatgggtgacctgctcaacggcagcatggcgggcggtccggatgagcacgctgctaagcgggcgaagctcgaggaggtacgtctctctcctccctgctcatctcgggctttttcccgccatctcccctcttttctttttcctcttgcctactggaccggctgggggctcgcgattctgcgcctcctgctcgctagcagggcgagacgtctgctcaggagcgttcacgaccacgtcccgtccagccttctcctttctcctcgagccccgtcgatgcccgcgtcccctccgcctgagactgtgcgaccagggtgtctgactcaatactccctctccccttcgctcgcgcgtctctccgcctcttccgctcgttccttcttgctctctctttctcccccatccgctcttcacttgatcgcccgacgttttatccgtgtcgttcgcgtttggtcactcgtagccgacgtcgcagccagctcagtcgctcggccagaccgcagcgcctgctccgtacgctggcggtctcgccccttcaccacagaccgccccggagcagcagcagcagcagtcccatcaggccttcgcgccgataaccggctcggcaggccagtcgcccatggacgttgccgccgccgcatccttctcggcgccggcgcctctggttgcaccgcagcaggctcagcagcagcagcagcctgcgtacccggtcgacccttacggcgccggtggtctcccagcccagtacgctctcaacccgtcgccgtcgcccgcccttccccaggtggcggcgcctgtcacccagcagcagcggcagccgtcccaccagcctcagccgtgggaggcacccgtcccgggctcgcagccgccggcgaccgtccagccgacgtcttacgtccctggccagcagcaaagcttcccgggtcagcagtcgcagtcgcagcagcagcagccgtacgcgcccacacagcagtacggctcgccggcgccggtcccgcaggcctcgtcctcgggctttgcgacgccctcgacgccggccggtccgccgggcgcctacgtcaacggccacttccagcagacggggccctcgctcccgctctcgcatgcccagcagaagttcttcctcggtctctgccggcagcttaagaagctcccgcaggcgtacgccttttcgagcccggtcgacccgatcgcactcggcatcccgcactaccaccagatcattacgcacccgatggacctgtcgacgatcgaggtcaagctccaggcctcgggccccaagggcaagggaaagaagggcggcgttcctggccggtacgccgtcaaggaggaggttgtcgaggacttccgccgcgtctggggcaactcggaccgcttcaacggccgcgaccacgccgtctcgaatgccggtcgcgcgctcgaggacgtctttgagcgcgagctgccgcgcctcccggctgacgaagaggtgcgtccttcatctcgcgctcaatttcgcctggccgcgactgactcgcctcttttctcccttctcagcccaagccgccgacgcccaagccgacgcaatcgcaccctgcctacccgaccggcgcgggcggcccggccggcattcgtgatgcagaggccgcccggcccaagcgcgatgtccacccgccgccgccgaaggacacgttcctctcggctaacgacccgagccgtcgaaagtctggcggcggtctgacgagcggcatgggcggcggctcgggcaagaagggccgctttgacgaacagttccgcttcctgcgcaaggagattgacgcctgcttcaggggcaagggcgctgagctctgctggccgttcctccagccggtcgacccgatcgcgatgggcatccccgaatactcggccatcatcaagcggccgatggacctctcgaccatcaaggccaacctcgccgacggcatttacgaggatccgatcgaggtcaaccaggacgtcaagctcatgcttcgcaactgcacttctttcaatccgccggggacggccgtcttcgacgccggcaaggcggtcgagtcgtactgggcgagccgctggcgggcgatgccgccgccgccggccgaggtggtcgagagcgagagcgagtacgaggtcgacagcgccgacgagggtgagtctcgctgcttcccaggccctttccgctcactctcggctccttacactgacaacctgcctttcccgtctttgcagagattgcctctatcaacgctgatctcgccaaactccaaaagcgtaaggaggcggtcctgacgcgtaaggccgcacggggacccaagaaaaaggtcaagaagtcgtcgaccggccatggcggcgtctcgggcggcgctggcggcggcgcctcgtcggccgcgccctccaagccgaagccgccgaagccgccgaagccgtcggcctcgggcagcggcggtgccggcggcggtcccggattgagcaagcccaagaagcagtcgtcgggcaacgggccgatgaagaaggccggcggcggcggcggcaaggcgtccggcaagaagcgcaacgacgacagcgacgacgaccggagcggtccggcccggactgaggtgacgatggcccagaagcaggagctcgccgagaagattcagcactgcgagggcgacgtcctcaacaaggcaatcagcatcatccaggacagcatgccgggcgacagcgtgcgttgttgcttcttcgcatcccctgctgagcagccaggctgatatgaccggcccccctcctacagaacggctcagaggagattgagctcgacattgactcgcttccggcggccgtcgtcctcaaactgttcaaccttgtcgtccgcggcccgcgcaagaagccgggcgcgggcggcaagtcgaaccggggtgggactggcgggctcaaccggaagagcatggatgagtcggcagagtcggaaaagattgctctgctcgaggccaaggtcagttctgccctccttttcttgacggatggtggctgaccctctattcttctcctcgacggcagatgcgggcgttcgagtcgggcgctggcggcgggcacgtcgagcagggaggggatgaggagggaagctcagggagcgactcggcgtccgacagcgattagcgatgccaccctgttcatgccatccctcttacatgcccttttcctacctgaaggaagtgttcaaggcgggaaggtgggtgtcgaggtgggagatgggcgaagcgagtcaagggttggacggccgggcgggcgcgcgcgcagctgcggccgacccaaagatttcggcccgtcggtcggggcgactagctgggcagagacagcaagcaaccaagtcgtcaacctacctctccggccctcgatcatccaagcgagcgcgcaggtcgtcacaagggtcatcgagaggcgtgacaggtccgcacgatgcgaaacgccggggcgtgagggaggtcgttgtcgtcaaaaaagagagaagggcgagaaaaaggggcgccgccgagcttgtagcgtgagacggcgttactgaaggtcgagcagctctcgaggcgagcctgacgagaaagaaagttgggcagggctgagcgacgctagtccttcttgcgccggcctcgaccgctgccgcccctcggccgggtcgacgacaccttgcgggcgagggccgagtcgcgcgtccaatcccaggccgggtcgagctggacaaaagggtggccgagggcttcggtcgccgagaaacgctcggctgggttgacggcgaacgactgctcgtagacaaagtcggccgcctcgggcgagaggacgaggtcggccggcatcggaggccgctcgccgtggccgagctgtcagaagcggggtcctataggtatcagccccggcgagtaaagcgagcgatcgacacgagcacgcaccttgaggatgatgggcatcatctcgagcccttgccacggccgggcgccgctgagcatctcgaggacgacgcagccgagcgaccaaaggtcgatcttcgagttgtagccctggccggcgttggttacaacctcgggcgccatccagtaaagcgagccagtcatcaacgtcccgcccatctgggtcgcctcctcgactgcgagcaaggctaagggcatcagcgtgaaatgttcaaccagagcgggggtcgcacgcacgagtctgctttgagacgccaaaatcggtgatcttgacgacgccttggtgattggggtcgacaaggatattatcgcccttgaggtcgcggtggaggatgccccggccgtggaggtaggcgaggccgtcgaggatctggcgcgtgaaccagcgcacctcggcctcctcgagcttgccgtacttgcggaagacgctcccgagggagcctgccaggcgggcagagcagaggagcgtcagcggcagtcgaccatgaggccgcggcagcagggaagcgtacctcctgggacgtattcgagaaagatcgagataaagtcgggcgactcctcgaagccgaggtactggacgacgttggggtggtcgagatccttgaggagctggatctcggaccgcagggccgcaatcacctgcgactggcggtcgtcgacccggtccgacatggtgctcggcacctcgacctgcttgacagccagcatctcgccggtcgtcgcattgaggccgaggtagacgcggccgtactgagaggggtgcggcgccaacgggtggtcagcgggcgttccgagatgacagacagcagatcgagacgacgacgcacggcgcctttgccgatcaggtcgcccttgacccacttgaaggtggctgggatgaggaagggaggtatgtgcgtcagtcttggcgtggatccgaagctccagaatgccggcgacgtactagcggcttctagggaagcctccggggtgacggccccgagctggcccttgaacgcgccgggcttgacctcttcgactctgccgccccacatccgcgtgctccgccggcggacgaccttgacgtcgaccggtgggcgcagctgcgtggttgagaggagggtgctggcggatggcaagtcgctacgctgccgctcttcggcgacgcggcggatcgacttgcggttccgtagcttggtctcgcgcgtcgcgctttcggcagcagcggtcgctgcagccgcagatgccgctgctgccgtgctggacccctcgccggggggcgagccgtcggcttcgataaactcggcctcgaggttgatctcgggaaagaacttggacagctcgcggacgacctgctcagccggcggacgaaacgcccactgcttgtcctcattcttttcaaagactgtctttttccgccggaggtggctggccgtcgagagctgctcgtcgccgaccggatcacccgagtcgggcgtgtcacgctcgggcgaggccgacgagaggggcagagaggcctgcgccatctcctgcggcgtcgtgtggatggccgaaattggggccgatgccgtcccagacgtgtcgattggcggcagcgagcggttgctcagcctgcctaacggaccgagggttgactcgtcgctccggaacgtgtcgtcgccagtatcgaggatgagctggcgcatgtccgaggtaaaggtcgagtcctcgccatcgtcccagtgtgccggatgagccgacgtcggcgccgacttggcgacgggtcgctgcgggagaaagagcgcgttcgtgcccgtgtcgtcatccgagtcgtcgtcatcgtccgagttgtcgccgccttctggcaaaactggcccggtcgcggacgacgcacgcgccgccagccggtagccaatctcggtgctctcgcccgtcgccgtagagttgggcgagacggacccgggcgcgtcgcccgagtcattgaccatgtagtcaaagaggccgccgtaggcgctctctcgggcggccgcatccggcgacggcggctgcgagagcgacgggaccggcacagggctggacggccggagctctgggctcggcatgtacggcggcggtggggcgaggtcgacggtcggcaagtgcggactggcaccctctgtcgcaaaccgaccgtgcgcggtggctgccagatcttgcgacgtcgtgccgtgctcgaccgctgacgagggcggatcgtgatgactcgagggccgacggggcagcgtcgagctcgatccgggctggccagcgtcaaacatcgtgctcggccggggcgaggcaatgcgcgtctcgccgagcacagggctccgcggcgagttaggccccagcggaagcggtgagcgattcggactcgcgttgcgcgagtagccgctgttggcttgagagccagagggataggtctggctgtgcccaaagcctccttgctggacgggcgggctcaggttgcctggtggcgaggcgacccgccggccaccgacagcgagcgtcccagagagatacggcccgtcctgcggccgactgccgccagaagtaggctgctgctgctgctgctgttgaggccgcgggcggttctgacccggcagcggcatgccgccgcgaaagttggggttgcttcgcatctgctggaggttgtgggcgtgcgcggcctgcgcagaaccaaggttggccggccggccgtcgtgcgccagccgctggggctgaggagtgagggagccttgctgctggcgccggttggcgagttccgaggcgctgcccgcagacgggaacatgctcggatgcggcgcttgggcataaaccgactgcgggtacgaaggtccgccgccgcgaggcagcgtgccgccgcccatcggatgccgatcatagtctgggccgcgtgtcctggatagcggacccgaaggcaacggcgggcgttggttcatgagctgggaggcgacggccgactgcgtggcgaacctcgaggacgggaacatggtcgccgcgccatgctcgtgggccgagggttccgacccacgatggccgatcgtctgggccgggcggtagggatcctggtagcccgacaggctgttggcatgggcagccgcggctccgccggccgggacgctccggttggtgagcgattgcggcggacgtccggcaccgaagccccagtcgccgaactcgttgaccgagccgggcgcctgctgctgggccatcgccctctgagaacgctcgcgctcgagctgctgttcgagctgctgctcgagccgggcctggagggggagcaacgtcagaacctttgtttcagaggaaagagggccgaggcgacagaccttgtagagctcctgttccttcctctgctcctccatcgctgtctcctcgtcctcttggatctgccggcggcgtcgcgcgtcctcctcctcgcgatcgcgccgctcccactcgcgtgccatctcctcggcacgctcgcgctcgatcatctcctcgaccatccggcggtctcgctcgcgggcctcgtggatcgtccggaggatgcgctcctgctcgtcgatcgactcggaggagcccatttgtcggatctcctcgggcgacatcgacggcggccgccgatagggcagaggcggcgggaccaggcgctgcgactcaaattgagtcggcggctcggcaggccacgtcggagtgacgctgccccgacggcaaaagagattctcgtcgacgccgagcgcctcggacgactgaagcgggatcggcggcgaggtcgggctggtgacgctcgatgccgggctgtcgcgccgccggctgctggcgctgctcgggcttgtcgtccggcgcgggccggaaaaaaggtgcgaggagcgacgctgatgcggcttccgtcggaggctcgacgtgcctccgctcgagccgccagagggatggtcgacatcggtcgccgatatggaggtctctgacgcagaggtcggataagccgcaccgccgttcgacttgatttggccaggccggccgtcgttggcctcgtcgagggcgttgagctcggatacgctgctcgccgtctcggactgtgacgtcggcggacgagggtagcgccccgaggcgttcgaatagtcgtcggaccgcttggacgtgctcgacgacgggcccgagggcatcggcggaggcatgatgggcatcgaaggatgggactgctcgaacgacatgacggcaagcacgcccttgatcggctcgcccgactcggcgcagtagagatagaggctgtcgccctcaagcgccgactccatctgcgacgagccgccgcccatcgcatgccgcctgagaaggaaggccggctgctcgtcgtccgggatctcgagctgcaaagaccaaacgagtcagtcagcgtccatcttgcggccagacaccgtgtcacatcgacaggacgtaccgcggtgaagatcttctcgcggatcatggccgagcacgtgctgccagaaacgtctgcgctagcaaacttgtggccgtcagtcgtcgcaagcagcgtcacccggccgatcggcggatgttcgatcgggcgagagatctggccggccaccgctagaccaagaggggaggacgagtggccgaacggtgctgccggcgccgtcgttcgcaagggcgacggtggccggggtgcgttgcgccaagtggcgcttttcgggggcggcgtcttgccgcgtggctgaacaggaggttcaggggccggcaggctagggccggacgagaagccgagcgagagcgaaagcggcgagccaggcgagatgggcgggaggctcgacgttgagggcgacgacgacgcattggacggtgcgacagaggcagctgccgactgggctggaggtgctggccgcggcagcgggcggagagggggtgagctgcctccggccgggaacaggctcgtcggcgacgtgtacgtctgcgcctgtgcgatcgacttccaggcgtcgaggtcccgaccagttaggttaggcggtggcggcggtggaggtggtggagctgccgatgccaacggagcgacaccagagaaaccaggcgtcgccaaaggcgtcgtcgcagcggtgctgccagcgtttgtgaggacagaggcagagcgttgcggggcaaagtaacccggctgtcgctggcccgcgccgttggcgtcagcaggaccggccaccggactcggcagcgctcgagcgccaggcaaagttggcgagctctggcttcgctcaggtccagcaggggcggtgatgccgttgagcatcggtcgcgatgctcccgggtgcgcgctccagggaccgccggctccgccgccattcgatgacggcccggcgccggccgaggcagtcgacacgtggaaaggtgccggggtttcctgcgacaggcgcgctcgctggaatagctcctcccggtgagccgtgcttgcctttgagctctcctcgtccgagctgtctgggtttgcgatccggagcttggccggccgacgcgtcgtcgagcccggcatgtgaccgccaaacgacttcacgggcgaagacatgcctggcagacaagcgctggcagtgcaggccggctgacggaagagctggaggtcgagaaccaggcgtcaaaggagccgctggggccgagggcggcgggcgtcgtagttcgagcggaggggccgtgtgatgaaggatcgcccaaagcctgcaggtgcgatgagcagagacccccagttatcgtcagaaatcgagcacagaatcatcgcccggattggcacccgctttggcggggcagtcagcgctctggtttgtgcctcgcgacatcaccgacggcacgccgtttcgtgctggtcggcaccaagggcgtcgtcgtcgcgcgccaggcagccagactgccaacttgtgcactcccttgcctgaagaacgtggatgtagacgcaccagtgatctgcgagataggcaggagaagcggacgccggtcagagagggcgagtctggcggcggcaagggcctgactcgatgggtaggtcgggccgtaaatgcggcgacggcggagaggggtcgttgcgcgtcgagtcggtgcgtcggttcgcgagctttggcggcggggatctctgtcggccaagctcgtctggaagcagcaggcagcgacgactgagcactcgagaggaatctgtagagaataggaaggaggacggaaggaagctgctggcggtcgcctcgtcgtttggctcgtgagctcggccagccttgctcgcgcggaggcgaagctcgggccgtcggcccatgctgcccttggctcgtcgccctcacccccgccagcctcgccctctctctagacaacactatccaaccctctctctcctccccggatgacggtctcgtacgcctgccgctgcaggaacgtccagatcgcagccgagcaggaggcgacggcccatcgaccggcggacctggcgctcagcttcgtgaggcccgacggtcgctagcacgacctggcaggcatctctgcccaggctgagaatgtatctgacctgacctgttcgttcacgttcgaaggctctcgatgacatggccaagcgcgacggctcgaccttgcagtgcttgatctgcggcgacgtcgtctataaggccgccgccgccgaggagggcagtaacgacgaggtcgagctcgtggccggggccgtctcaccggacgtcgagcgggtgcgcatcatctgaccgtccgaggcagggacgcacgaccgcccggggctgatctcctgcttttgctgctgctctcgtctggacgcccgtgcagacctcgtcttcggcgaccgttctcccgctcgttctctcgtcgctggcagcctcgtcgaaggaggtctacccatcgacgccgcgcccgccgcccgtggtcgccgccccggtcgtctcatccctcctccaggcactgccagacccgctcttcctccctccacctttcaccccttcggacccactgtttacttccatctcgactctcgccgcgaccaagctcgcggcacggcggcacgagctcgagaaggagctcgctgccgtcatcggcgagaagcgcgcagccctcgccgaggctgagcgcagcgtccaacgcgaggtcatgatcgtctggggcgcccaccaggcacaccggacgccttcgccctcgtcttccccgccagcgctggccggcaagccgtccagcacgtctgcctcgacgagtcgcgcaccagcgccgacgcgcgacactggcttcactgccggctcgcgcggtagcttgtcggtcgagcgccgggcggaagcaaagtccccgtcgcccacctcgctcaagatcggcgtcccgcagacgacagtctttgccaaagtggtgcagagtccgaccggctcgccgccgtcgggtggccatgcgtccctgctcggcgcgagcctcgcccggacctcacacatgcaggccgccgccgcctcgccggtgacaacggcgccagcccggtcgcccctctctccagtctcttcccagccgggcaacattgcctctcctgctgcttcggcaggtgcctccatcccggccaagaagcgcgagcgtcggccgtcgaaccaggacctcgatctcgcgacctccatgcggctctcgcacatgccctcgccgccgaatctcatcttctcaacaaccaacgcgcgggccggcgcgacgctcgtccgcgagggcgacgacgtcaaaagcagaagcttcgaggaacgggcggcactgctcgccgctcagccagtcgtgctcaccccgccggccgaggaggtcgagggctccgagggaggcaagggcggcgagcaggaccttgcttttcgtgagtcaccgagcgtgcccatccgcgaggtagagactccatcaaagccgcccgccgagccgaagcccaaggagaccagtaacggcgccaagcgcgacagcggcacgccaaagcgcgtcacgttcaaggacgacgacctccctccggaagatgacgacgatgaggaggagggcacggtcgtcggcgagcaagaggacgtctttgactttgagcctcattcgcagacgtcggcctcgtcctcgccaccgacgtcgcccggcggcccggccgactcgagctcgctcgtccgaccgacggctcgttcgctcgagcgtccggacgcgggcgacgggtcatcgacggcggcagctggcagcagcagcagcctgaagcaggagccactctacacgcttgacggccgggctatccacccggtctcggcctcgtcgtcatcgccggcccgggcgctcagcgccgaacggccaccgcaaagccgagagaacgacaccgacgacgagaacaaggtcttcgtctcgatgcgccggctgacggcggccgacctgccgagccatcgggcctcatacaaggattcggcgacgaacggcgtccgcaagtgggcgatgtacggccgagtcgcgaatgcgcggtcgccggcatcgagccaagactccgacggtgagtacccgctgcgaacttcgcctagctccttcggaacgcgctgacattgccgcctgccgtctgatcgacccgtctccgcagacgtcgcttaccagggcggccagtcgctcccgatcccgcttgccttcccgccttcggcctcgctcatgacgacgcctctcgagcgcaagacgtcgctgacggaccggcagatctacgtcccacccctccggccggcgatgcgctcggccggctcgtcgaccgcctcctcgtccaaggcgccctcggcagcatcgtccccgccacggacctacagccagagtagcggcgcgagcatggaccccggcccgctctttgacgaggacgacggcagcgagacgagctctggctttgtcgctccgcatctcaaggcgctcgagggcggccagagcggcgatgccgttggctgggcgtcgatggtcaaccggtgaccagggtcgacggctggagcgtcggcgcaggaggctggcgcagagcagaccatctcgttgttgtactagctcttattcttccgtcctgtgcctgtctggttgccaggttgagcaaaggatatcgttcgtcagggcgtcggccgactctgtgcggggggcgctgttgcaacggcgacgcaagcgcctcgagcgcaggccggggccatcgcttcagtctctccgacctccatctatcgcctccttcctcggcatacgagcccttctagacgaacacatctagacgtctcctcggacgaccaggccttgcgcatgagctcaccgacctcctcgctgaggaaggcaccctacggggcagagagtgagtcgggtcgcgagctcgggaggccttgacccactcagttccccctcccttgcctccccgtccgaggctgctccgtcaaccgccggtctgaccagccctctctcttgctcgaactgctcctccaggcaagcccgtcagcgacagcgaggcactgtaccagttcaagcttctcgaagctctccgaagtggcagtgtcggcctcctgcagccgttcctcaatgacctcacccgggcggcgggaccgggcgaggaggacaaggcagccgcgatgctgaatcgggccgtcaagtgtgcctgctgtgcgtcctccgagagatcgccatcggcttctctgcgagcctgtgatcgacctctgactgacttggtcacaacggcatcgctcagacgggacggtcgagctcatcctctccaatcgggcggtcgaccccaacgccccgtacccgaccgagtctggcatcacgcccctgcacctcgcggccgagctcggtcgtgcggatatcggtgagtctgcactcaacctcaagaggaggcggtcaggcagctgatgttggtttgttcttggtggccccttgcgctcgcagtcaagctcctgctcgatcagccgaacatcgacgacaccctgctcgacgcctcttcacgttcggtcctgagcgctgcatcgtctgacgaggtccaggcgacaatcctcgcctcgcgtcaggcgctccagacccactttctcgagctcctggcaaagtacatagacgctccagccgggacgagcaaggcgaccgacggcggccgcgagggcgaggccaaccagctgttgcagctgctcaagagcccccgcgctggcgcgctcgacctgaacgcgctcgatgccaacaagggcgtctctgccctccatgaggcggtccggtgcgtcccctctggcctgtcgtttggctcgcttgcaggtgtgtctgaccttcaaccgctctccaggcgcaaggatctcgtcctcatcaagtacctcgtccttgagcgcaacgccgacgtctttgtccgcgaccggcgcggcagtcgcgtgctcgacaacctcccggccggcgaccacgtttcaaacctgctcaagcaggcgagcaacaaccagaaggcgctcgcccagcgcaaggaggacggcagcccggttacccaacggtgcgttccgggcggcatacgctgcttcgccatctgggctcgcccgctgacttccctttgcctgcctgggggtcgcgatgcagtggctacctgctcaagtacacgaacgtcgcccatggctacaaatcgcggtggtttgtgattgagagcggcgtcctctcttgtgagtcctggcgtcatcttgtcgcggtcgcaggcctgaagactgagacccccgtccaccgctctcccgcccccagacttccgaaaccaggaggaggagaacaaggcgtgccgcggctccatctcgctcaagtttgcgacgctcaagtcgatctcgtcgacctcgtttgacatccagccggcgacgaacgactcgcgcttccccaagtactcgcttcgggcgagccacccgcaagaggcagccaactggtgccagtcgatcaagcagcacatctcgttctacggcaccgagggcgctggtcaagtcgtggacgacagcaaaaagcgccacagcctctcgatccgccggctgacccaccatcggtcgagcaaggagctcaatccggaccggaccgactcgggcgcgcccctgcccgcctccctcggcgtgacgccgatcgacggcagttctgcgacgcaccggacgctgtcgcgcgtaccatcgctcggcggcggcggtggcggcaaggctcctgcacccgtgactgtcgcagtgacggctccgagcccggccgcctcgcaggcgcacatcccttacagcgtgcgctcgtcttcgcccggaccgtccattgacggcacggtcgacgacgacttcgagtcgtcgccgcccgtgggccagggcccgctccagtcggtcaagcacgtctcgattcacggtatcccttacggcgaccgctacgagctgctcgccaactctgcccgccagcatctcgaggtgacggaccagctgctcagctcgctcgtcgtcggtcctggaggcgcgccgccagcgccatcggccggggtatcgacgtctccgacgaagccgagtttgatgcggacgttgtcgacggcgtcgtcgcggcagcagtcggtcaagaactcgctccgccagtcgctcaaggtgctgtctgacctgacggtcgagtttcagcacatgtcgctcgagcgggagcgctggctcgtcgcccgctatcagcacgaggtcgacacgcgccggctctgggaggagagcatgcaggacgtcgccaaggagcaggccgacctcgagagtcagctgcgcgaggccggcgaggagaatcgccggcacatcaaggagatcaaggcggtcaggttgatgagccccggttacgtcggcagcggctcggccgcgctcatcggtgccagcccctttggcgcccggcctgacagcgtccttgctccagccgacggtgtcgcgccgacgctaaacaacctccagtcgtcgggcaaggagctcccagtcgtgccgcccactggagccgacccagctgacccgaacgtcaagattgccatgccttcggctgaggtgcccaacggcggtctcccggctttcgagtcggacgacgaggaagaagacgatgacgacgagttctgtgcgtctgctggacgagattgatctcaacgcctgcctcgtacggggactgacgcctccttgccgacctgcagacgatgccatcgaggctggcagtgagtactggctttgttacacctcgctcatgcgttgtcgccagattgaccaccgtcctctcgctctccaggcctcccgcttcagatcccgtcgtctttcaagccccagccggcggcctctgcaaagagcgagtcggtcgagacgcgctcggcgccggttaccgagcggccgacgtccaagctcaatctcgacgccgagccgtacgagccgtacaagcacctgcggagcaagctgccgatcgccgacgaccagcggccggccatcagcctgtggtcgatcctgaagagctcgatcggcaaggacctcaccaagatctcgttccccgtctcgtgcggccatctgcacctgtgctcgggccccgctcggtcgtcgctgactccgctggctgtcgccgcatttgcagcttcaacgagtgcacctcgatgctgcagcgaatggcagaggacatggaatactccgagtgtctcgacgccgccgccgaggaggagaactcgctgaaagtgcggcccttgcgacgcaaagagaagctccggcgacaatcgctgactcgctctgcctgcgccttttccagcgcatcgcctacgttgcggcctttgccatgtcaaactactcgtcgacggtcggccgcatcgccaagccgttcaaccctgtgcgcggcgctcgttgaaggcttacatgcctcctcgtcctgtcgactgatcctctgtttaatcctccagatgctcggcgagacgttcgagtacacgcggcccgacaagaagtttacgtacgtctcggagcaggtctcgcaccacccgcccatgtcagcctgcatggccgagtcgccccgctggcgctactatggcgaggtcgacgccaaaaacaagtttaccggcaagtcgtttgagatccggccgaccggcgtcgcgcacgccgacctgtcgatcccgcgcgagtgggcagtcggcagcggtcacaggcgcgacaacctcctcccggacggcgacgacagccgcgtgctcgagcactacagctggaagaaggtgacgaccggcgtcacaaatttcatcctcggcaacccaatcatcgaccactagtgcgtgtctccatcgagtgtctgtcgcaccttaatctctgacaccttctttctcgcgcagcggcgacatggagatcactaaccaccgcagcggcgagacgtgcaccctctcgtttaagccccgcggctggcgcgcaagggactcgtttgagatcaagggcgtcgtcaaggatgcaaagggcgccgtcaagtgggacattgctggccgtgcgtcgtctcgccctgagactgcctagcaggcgactgcatgactgacaccgctcctcttccgtgcgtcaccgcaggctggaactcgcagctcgtcgctcgcaaggccggcgtcggtcacggcacgctcgagcccgacgccaatctgccgacggtcggcggagcggcctcgacgccgcacatcctgcctgagtacatcctggtgcgtcaccccacctcaccggcttgagctcggcctccgcgcggctgacacgctccgtcgacggcatcctttcagctctggaagaacacgatcaagccgccggcgcctttcaacctgacgccgtttgctatcacgctaaacgacctcccgtccggcctctcagagtggatcgcgccgactgactgccgcatgcggcccgaccagcgggcgtttgagctcgccaagtacgagctcgctaacacgttcgtcccctggccgctcgatgcctcgcgtctaggaccgagctgacgcctctgtcatcggctgcggtcagcctcaagcaggaccaggagacgaagcagcgcgagattcgcaagatgcgcgaggttcgtcgccccgctccactaggctgcctacctgacacgacactgacgctgccgacgttaccgtactacagactggccagatgccgccccacgcgcctcgtaagttgcaagagagccgcaagacgttcctctggtgcgcgaccgaccactgatcctcctttacttcgttcggcgttcggcaggctggttcaactcgtcgatcgacaaggactctggcgagcgcgtctgggagcccaagcggacggccttgggcgagatagagtactgggccgagcgcgttcgtgcgcacaaggccggcggccagtggaccaacgtcgtgcgtcctgatcctgcctgtcctggcgagaagcgagtcgctgctgaccgaccgcctctccgcaggacgacatcttcatccacgtcgacatcgaccagtgatgtgaccaccactctctctctgtctctcttccgctctcgcacgcgcactgtacttgtccctcgcacaccgttctcgttctcgcctttgtctctgtcacatctctctctcgaatgacctggcgcccgtagcgtccgagagattagcgtccgagagtccaaggtcgaggggcggtctcgacgacgcctcggtcagtcagccctcgagacggctgccctccccgacgactatccgatttggcctcttcgctcgcacctctcagcgaccgctcgatgcagaacctcctcctctcgctgccagccgaggtcggtccctccagtcggggcgaccggcagcctggatgcacgcagctcgactgcgcccgtgaggagaggggcgctgacagccccatcgccctctcccagatcctgatccagacgctctcgcacctgccgccggacgcactctacgccttctcgctcacctgccgccaggcgaacgacctgctgctcggcgatgacgactcatggccggcttggaagggcagctactgccttctctttgacgacccggctgacagcggctggccggtcgccgcccaggctcacgggagggccggccgcgactggagggcgctcacccaggcctgcttcgaggcggccagggcgctgctcgagaagagactaggacctgcgaccgacgtgcgtgcacctctgttcgcgactgaagcacatcccaggaagctgaccggcagatgggcaacctgatgggcagacaacgacctggctcgccctgctccatctcctccacacctcgcccccggccggctcgccgtcgaagaatctctcggtcctctaccctcgattgctgccgtcgctgctcgactttccggccgggcacggcgcccggccgctgctctcagagctcatcctccatctcgaccatctcgcctcctgggcgtgggacaagccggccgaagagctcgggcgctaccgagagaacgtctacgatctctcgacctatgccgaccctcccaactttggacccttcttcgtcggctttggtttcagcagcgacccgaccgatgatggcggagtcaaggttcgaggtgtcgattgggagaaggtgagcggctggaggcccgtctggcgcatcgacctagcagctcatcgccgccggcctgatctcatcgcaggcaaacgcaattgcccagatcatgggcgcgagtctccgctcctcggccgagagtggtgactgggagggcaacccggacgacatgcctgcgagagccgattacgctcggccgggcatccggcggaggccaaccgacgagacggccgacgtccctggcgactgggccgccatcaacggcggctggcaaggcggctatgccttcatggactacccggagtttctcgcgtggaactttccccggctgacccgccagacgacgcggatgaacctcgagacgctcgacgagatcgtctcgaacgcgatgaacctcgatctcgtcccaaatctcccggtcgagaccgacggctcggcggccagcacgcagttgaagccctacagcttctcgggcacgtcgcacaacccgctcgtcggcttgtcgcgggtcgacggcgtcgtcactccgctccacccttcggcgcacccgtcggccctcgcgagcttcgtcgagccgccgcaggagactagggtgaagatgaccatctcctacggcggcttggcccggtgggcgcttgagggcgtcctcctcgagggcggccgaggaatcgtaggcgtctggaccgagcacgacagagaaagaggaagtccttgtggccctttccactattaccgcaggtcgtcagaggaagatgaggacggcgtgtaacgatgcgcatgatcttctccagggctctggcagacccgctttgttgaaagaggcgtcaagtggcatcatgaaggccagcagtagcagtatagatctctgcgcgcgccgaacgagttggactctcacgacgaccctttcctcactccggcgaccctgtcgccttctccccttctgtcccgtcttctctttcacaggaatctcgacgcacgacgccctctttcacgccccacgaccctcttcactctgaaacgaccactttaacgaccaacacccagcccccggcctgctctctcaccttgctgcttcgacgcgcccggtccgccctcccgaacgaccctctttacccttcaaccccttctcactcctcattctggccatgcaagccgccatgtctgctcctctgcccgcctctttccgctcggtcccgctcgtctgctcgggccaccagcggcccgtcgtccacctcaacgtacgtcccgcaccgcgccctttccgcctggcgagttcgggccgcccgcagttctgtcgcctgacgctctctccctctacctccacgaacagttctcgcccctgcagcagaatgacgagagctttatgatgatctcgagctgcaaggacggccagccgatgctccgcgactggacgggcgattgggtcgggaccttcctcggtgcgtcgcccgcctgtctgcctttgataaaggccatcgaggtcgcccggcagctgatcctcccacccactcttacgtatgcaggccacaagggtgccgtctggcagtccaagctgtcaaccgacacctcccgggcggcgacggcctcggccgacttcagctgcaagatatgggatacgtacaccggctccgtcctccataccttcaaccacaaccacatcgtccggaccgtcgccctctcgccctcgacctcggccggctcgagctcgggtgcctatgtcctgacgggcggccaggagaagaagctccggatctttgacctcgcccggcccgagcaggagccaatgtacctcgtccggccaggcgaggccgaggccagcaaggcccacgagggcaacgtccggagcgtcgtctgggactcgcaggacggcaacgtcgccgtctctgccggcgaagagggcgtcgtccgctggtgggatcttcgaacgctggagcagacggccgagcttaagctgcccgacaccgtcaactgcatggagctcgcccacggcggcggcacgctctgcgtcaccgccggcaagtcggtcatctttcttgacattgcccggtgagtctctgcgcaagctgcctgtctctctcctcgacgctcatctgaccggctgcgctgcttgctcatctagccgcgacccgccgctgtcgatcccgctcccgcacacgccgacgtcggcttcgctccacccgttcctccgcgaccgctttgtcgccggctcggccaatgacccctgggtgcgcgtctacgacctcgagactggcaccgagcgcgagtgctacaagggccaccacggccctgtccactcggtcagctacagcccggacggcgagatgtacgcctcgggctccgaggacggcacgatccgtctctggcagacgcacccgggccgctcgtacggtctctggcaggccaactcagcgcgctgagcgggtctgtctaccggctcatcgcctaggcgtttgctggctctgatcgcaacgctcggcccttccacacgctatgctctcctgcgccatcccccgccgcccctcatgcccgtccctctcctggtcctggccgtcccggcgctcgcagatcaccctctccgcgtctttccaatgaccatgtgcttgcgctacagagtcttgcatctcatcgtaaagcggcggccgctagccgagcgcgcttggcgagcgccttctcgaccttctcgacgtactcgcccatgccgccctccatccgcttgaccttggcgttctggacccgccagaccttgccgcgcggcagcgtctcgtcctcgtcctcttccgacaagtcggcatcagagaggccgtcatcgtcgagcgaggcggccgcttgccggagcgtcgcgccctcgatgacccgtcggcagaaccagcgatcgtgcgtgacgaggatgagcgcgccttcgtaagtccggagcgcgtcggcaagcgccttaatggtggcgagatcgaggtgggtcgtgacctcgtcgaggagactgtgcgacggtgattgtcagcggctttccattgagccaagagggagcggtcacgacgaacagcaatgggggcggccggaagacgacgaggctaaaggcgagccggacctgcagagtcgggaactacatcagcagcggcagagcaagcgaccgttcaagtgtccgtgcgcaccttctgaccgcccgaaaggccctcgacggccgtgctcgctgccgtcttgccggtgaggccgaggctgccgagcgccgccctcgcctcgggctcctcgaccttgattccctgggcggtaacgtgcttgataaagtactcgagcgccgtcgtctttgtccccttgacggcttgcgtgacctcctcgaccgagtgctgcgagtagtggccgatctggcggaggagcgggtgaagcagcacgcttccggccgacggcttgagcttctggaggatcaggttggcgattgtactcttgccttggccgttctgcgacggagcaaagtgggtcagtgccctgctgtaatggcggccacgttcaaaacgtaccgcgccgacgaaagccatccggccgccctgctcaagcgagaacgagacgtcctcgagcagccactttttcgcccgcgggtagccaaacgagaccttgtcaaaggtgacgaggtcgcccgtcgtccgcaggggtgcagggtccgagaggacaatcttgacgggcgggtcctggtcctcgaggacggcgtcgcctcgatttgtcaggtggtctacgagccgcaaggaaagacgagtcagcgtgcgaaaggtggctacgtcaagcgcccgactgacagccctcccggtcgcggttgagcttgaagcgatggcccttgtcgttgacctcgaggccaaagctgaagggttaatctgtcagtcgtctgtgctcaacaaatgcagagcggcccagcgaaggcgagacgcaccgctcgtcgagcttcttctgccgctgcgacgccagccgcgacttgttttcgtcgccgctcttcttagccgttgctttcgcattccggatcgtgctctcaatgtgcgacctgtcagatgagcagcgttagcctcagacaagcgccggacgaggagcacaggtggcctcaccgcttcttgtcgagcgcgctctgggctcgaattgtctttctgcgctccttcttttcgctcatctcccactgtgctggtgtcctgaggagggggagaagggtacgtcaacgagcagccctgttcgacgccggccagccggtcgacagccgcacccctcaaagtagcgcagcgtctgggcgcggataaagatggtctcgtcgacgacgcggttgagaaactcttggtcgtgcgacgtgatgacgagcgtcgtctccatggtatctgtcaggtacgactcgagccagagggtcgaagggaggtcgagaaagttgttgggctcgtcgactgtcgttcgtaacagggtcagctcgagcaaaggccgtgaaggcggggtgggaagcacgcaacaggacctgcgacttgacgagcagggccgacgcaagggagcagcgtgagcgccagccgcccgagaggctcgtgtacgagccgtagatcatctcttgtgagaagccaaggccggtgaggactatgcctgcgttggcctcggtcgtcaggtagtcgctctggtcgaaggcgaggttcgtccgacggggtcagtcccgaacatgtctgacggcaagggcatgactgcaagagacgcaccaaatccagcgtcacctgtaggtcggccagcagagccacggccgcctccagcgggtctttggcgtcagacagcgcgagggcttcgaagctgtgggcgtgttgcaagttgggatcagcagctgacgcgagtgagtggagaagggggacaaactgggcggtcgtctcttgcagcttgacttcggccttctcctcctccttcctcgcctccttgcccctgcgagtccaccgagtgtgtcagcgtcttctaggcacgatccacgctaactgcagaggacacgcacctggccccgctccgacgggcagcgatccggcgcttgacgtctagattgtccttgagcttctcgatctcgatccgcgcgacgacccgctggatctcctcggtgtcgagcccctcgacggccttcgtcagggctaaggtcccgtcggtcggtcagcctcagcctggtcgaggaagcgcagcacgactctccccaggactcaccctcaaagtccctgagcgccctcgctcgcgtccgatcgctgttaacgaccgtctgaagcacactgacggccttgttttctgtcgcctccttggtcgagtcggcctcggtctgcgagacgagctcgaagcggacgttggccggcaggcccgggatcaggctgtcgcggagcgcgaggaggagcgtcgacttgcccgagccgttcctgttactccgagcaccctaagctcagctcttgtacctctccgacgagctggcaggaaaggaatggcggacgtaccggcccatgagcgcatacttgacgccattcttgagccggaggtgcgagtcggcgataacctcggtccggcccacggcgacggtgacgcccttgaggtcaatctctttcgaggctgtctcgagcgtctcgaggtggaaactgcgcaatgggctcggctcgaggtcagagccgggttaagggtaggcagaaggctcgaggactgaaggtgtggcgtgcttcaagagcaggaagacggacggaccgtgactgctgcgagctcgcagtgattgacatagcttcgtgctgagaggtgccgaacgaggatgggtcaagaagcaggagaaggaagattcccagcggatggtacggctggaagttctctaggggctgtcgtcgtggtcaaggtcgagaagaaggaagagaacgaggaagaggaggaggtcgagtcgaaggagcgtcacctcggctcgtcggctctcggctctcgccgtctcccgcttcgtccgctgtcgagaaggatgaacttgactcgtccgctcagtcgctcaacctcaagactctgactcagggacggatgtcgagcaatgctgcgcatgtcagcgtgcgtgtttgagcaggcaaggagcatgcaagaaggggcacgcctaaggcgacgacctgacgagcccgaaccagcagagcgccgcccaatacgctgccggcctctcctatataccacgtcggtggccgaggggcgctctgagggcatgcgttggactcaacggcgtgctagtgccgtcctcttaacctggtgggtgagagccatcgacggcctcgtcttggccctttgcggccggccggccagacacctcttgaagaggggcgacgacaaggcgtctcgccccagctagccgctagaggaggtcgcccggtgtgagcgatagctcgttgtcttgaagaggagcatgtcgtgtcgtccgatgcctggctgactatgagcccaacacgacctcctcctcctcgaccgcggtcggtcgttcgaccttgacctcgggcgacgccgccccctcctcgggcaggtcagccctcggcggtccaactgcagacctgccctctgccacctccttcacgagcggttgccgaccccggccaaggagctcgagcagcgcccacttgcgctcctcgagtgcctctcgctcgacctgggcctccccgctgccgctgctgctgcccgacgtcgacgagggtccagcctttggcgtaaagtctgcgaggagagggagggccgagccgagtttgaggtgatggatcgacgtccggagctcgagctggacatcctgccctctcgacaaagtttcacaccgtcagcccgagaacgagaggaggaggaacagggcgggggacgcacgtcgagtagctcgtagtagccccgcgcagcttcgaggaagcgttcgccctcttcgagctcttcttcgccctcgggcggagggaggagcccttcgagcgcttggctgaggagcgtcaggagcgagggaatccgctggcgagtgcgggcgagagagggaggaggggtaggtcagctctggactgaaagcgggcgagggttgggcagggggagagcgagacgaggcggacctgctcgagcgagaggagggaggcgatcgactctccgggagtcggcgtcagggcagccatcttggggtgcgaggccgggtcggcagggcagagtggaaagcgagttggttgaagaggaggtcgtggccgacgggcgggcgatgcgaccgacgctggcggcgtcggctgaactccgtccggcgtgacgagcacgatgtgttgtcgtgaaaggggggcatgaataaagttcgtcaagggtcggagatcgcccagagcagatgagagagagagagagagagagagagagagagagagagagagagagagagagagagagagagagagagagagagagagagagagagagagagagagagagagagagagagagagatgcatgggacccgcgggcaggacgtgaggtagggcagaggaggaggaggagggggagaccgttgcccgatcccgcgagaccaaccgacgagcgacagagggaggctgccctcgagccatcgcatgaaggacgcaagcgcccaattgccctgtggccgacccgctagcgcttgtcgctctgcgagccgggccactctgcgatatcgccccgctcaatcagctgcacctggtcattgtcgtcctcaaagacgacaaagtaccgctgctcggcctcgggcacaggcaccatcgccgccggccggcccttcttgcccttcggcgccggcgccgaagcgaggtcgtcccgtggccgttcagtctcacgcgagcggacgacgccccggtagaaggcggtcgtgcctgggtagatggccatgacgagcgagccgaccgggtggggcgaaaagtagagcgggttggcggggttgtcgagcgaagcgccgacggttgggagcgggacaatcgctttcagtgtcgtgttgtgtaggctagtgcgagcggaaggagagaggaagagaagaaggcagggtcagctcgagggcgcttcgaggcacaaccagcgacctggaggaacgcacacgccgcccgactccatgtctgcgtccgcaacctcgtaccgcccgacgtcctggccgatattcttccgcacgatcgccaagatccactcgtcgtccggcgggagctcgcccgtcgccgcctgcttgttcgccgccccgcccgtcggcttgaccggcacgcggaaggcgacccttcggccggcggtcagcggcagctgggcagcgagctcggctttgcgttcttttggatcgcgcttggcgagcgggacgttgtggacggcgggtatcggcgggtagtttgccggatgaccggctggcgggccgccccctcctgccgctcccgccgtcgctgcaggcggaggcggcgcgctcgtccgcgagatggacgacgagcgcgagacgatggcagtttttggcggccggcctcgcttgcctgggtgggtcgccgaggtggatccggtgccgccgaggagggtcgagttggccggcgtgcctggcggtgaggccgtcgtgtgtagggcgaggaggatcgagagcgactcgagcgcggcgtcgtaggctctgacgggccgtgcgaggtcggtagttcagcatttggagcagctctaggaggtcgagggagctgaagagggccagcacgcacgcgatctcccggtcgagcgcctcctcctcgcccagcagctgcctcccaaccttctccctccctacccgccccgcctcgcccctcagcccctcctcgaccagcgcccgcagcctgacatgcgcactggcgtcctgcgtccgagggaggcgcgagagggcgtcgagcgtctggcgccagagctgggactcggccgggttgtcgggctcttggtgcgggttggaggcggaggcggaggaggacgggcgggattgacgcgggcggcccgacatagtgtgttcaggaggaggctggcgccaggaagagcagagcgctgtttgcggggatctgtatgagggcggatgactgccagggtggcctggctcgagaggaggacgggggatgcggtcggagggagcgagagagctgctgagacgagacgcgtctcgcagttcatgtcgacaacgctggtcggcggcccggcctcaatcaaggcgctcacagacagacccccagcagaggacagtacctgccaggagagctgcatagccgagctcgcgcttcgagctcttgcaactgcaggaacaaggcattgagagaagaacgccagccggcgacacgcccgcggagacgatgctgcggctactccaatccagctgctgctggtctcgactcgccatgcgcacatccgactggcattcatccaaagcagcgtcgccgctgggccggacggtcctgctgatggctcccacactcatcgaaggcgggagcctgatgtctctccctttcttaccctcgtcggtcggcggagtcgcttcgcaggtaaccctaactcacacgggaggggagcgagaggctcgagacgctccgccttcgtgccaacagatccctcaccctcgtccatcttctctgccagactctctttccggacagcaagccgcgatgcctccccgaaccgcccgctcccagccgaccgagccctcggtcatccttccgccgctcctgcggtcggtcgagtcgagcgcctacgccgcccaccagaagacgcggacgacggcggcccgactcgtcgccggaggccatgacgccgaggcggccgaggtcctgtttgagctctcaaaggcgctgctgaagaaggaggagtgggggagcggcgtcgaccttggctcagagctcatcaaggtctgggacggcgcagaggtcgagtgcaacgagacgacgcgaggtgcgctgcacatctctcgctcgctcggctgagatggtcaacgctcggactgacaagctctcgccacggtcacacccctccggtccgcaggccagatcacaaatctgatcgccctctgcccgtcgtcggccaactggcgcaagacgctgatcgatcaggcactcgcgtgcgtcggcttgtggccgaggtctcttccgtcggagacctgatacccgtgcttctccctctctcctcgcagctgggcctcaaagcaccacgccttcccctcgccggcatccgatcccctccttcagcagtatgtcggctcgctccacttcaaggagcgcaactttgccctcgccgagaagcacctcgtcctctcggccacgcgggacgccgcccggctcctcggccagctcggcttcgagtggtcggccaaaggcacggtcgacccgtcgccctacctcctgcggacgacgctccctttcctgctcgaaagcccgcctgcgatcgtcccgttcaagacgagcttgacgaccttcctctcactcctgatcgagagcgacccaagcgtcctcgtcgagcgggtgccgctcccaaccgagctcggccagggcgacctgctctttacgaagctaccgacggcaaactggctccagctcgtcggcttttcagtccagcgggcaaaggcccccggcgcgcaggacggttgggcagagctcggcaaggagtaccgccggctgggcaagccgctgctcaaggagccggccgttaaggcggtcagtccctgctctcctttcgtctttaggccgccggctttagctgacgcaatgcctcgtgcgactggctcctctcgcaggccgtcgccgccatcggccagcagacgtttggcatcgccccgcccaagggcgctggcggcaacggcctgatggacctgatgggcagcctctttggctgaacggagtcggcgtcatgcagaggcacgcagctcggtcggcacgtcgtgctcgctcgacatatgtcgcctttcgcccgattgcagcgcctctcaggacaacgcgcgactggggaggggtgggtcattcgattgcagcccggcgcgccgtttcagaccgctcttcgagggtctgccggcgcagcggtaggttagccagtggcctctgttgctactgcgcgcgatggcaggccgccggtcgagggaagaccgacggcggcccggagctcctcccagtgcgtccagaaggcgaggacgacttccacagcaatcaagaaagtgatgaccagctcgaccgaatgtgatgatttcttggagcagagggtgggttgtgtcgtcagcgagtgcacgagggatgttgacggaggcagacgcacctcggtcaagaggtccttgaggataccgtgcacctcctgggcgtgcgcgatccgctcgtggacggctcgtacgcgcttctcaatctcaaggatcttccacgtgcccttgaagtattctgtcgacggacgggaaaggtgggaaaggacgatcagctgcggccgagcgacagacgtcgagcgggaaacgcactctcgagcagcggctcctcccagtagagatcgggtacgtctccaaggctgctcgagaccttttgcctgacctcgagaagctcgcccagacgctggatgaccttcttgcgagcgtagggcccccggccgtgctttgcgaggtaagacggcacacctgcgtccttctgaacgagggcgtcgagctgggcttcgacaatcgacagtgtcggtgagtgcgagagggcttcgctgatggcgtatcggatgagtagctgtgtgagctcgggatccggtgggctactcggcggaacggccgtcgcctcgacgacgggcgccgtcggtgacggccttgcgggtaggatgacgatgtcgccctcaagccgcggcgcttgcctatggtgagcgagccaaaagcgatcagctccggacggccagacgaggtcttaccataaggacgtacgacgagctgtccacgaagaagtcaagctgctcggtctcgcccgccggcaggggtgacgacggctggcctgctgcattcgcaggccgctgcttccagagccgggccgcccaagcccggagctcgtcgctctcgagcccccagccgacgacagtgccgccgttgaggatccagcactcgcggccgccggcttccagcgagccaccctcctggacgtaaaacgccgtctggccggtgctaagtgggattgagcggacgctggccgggagaacgaggctcgccgtcgaccgaggtacgaggggcgcaaaggcgacgagcggtcgaagcgctgacggcggtattgatggtggcagcggaagacgagagatggatcgggagagcgagcggcaggcaaccggccctgtacgcagcatagagagcagggccatgctggccggctgaagggtgggggtgtggtcggggtgggtggcgagcaccctcgggtctgccgttggcgggtcgagctcgtccaggtagagagacacgaggaggctgatcagctggtccaggtatcggccagcggcgagagtaggcgaggaaggagctgctgggtggaggacggagagacgagggaagttcaacccgcccgtcgcctaccccttttcgctcctcggcggcaggccgcgcggcgtgacgacgcttttccgctgccgagaagcgagggaccttgatcgacctcgacgacggcgacctctcaactcccgtccctgccgcctctcgccctccggacgatgccatggctcccggcagcctgaccgccctcgaaaagacggtgatcgctcaggccgtctaccaggcgtcatcggccgacctcggcgccgtcgcccgcgagctcaacacccaccgcctgatcgagcaacgtcagggcaagccgcccgtgccatggacagagcgggtccgtcctcgtcttgcaaacgcccgtgctcgtcgagcagctcgactggatggcagccgctgacggccggttgcccgctcctgtacaggacgtcaagctcgcctacctgcagctgtttgacgcgcacgtccggacgcagacgcgcgaagccctgctcgacggccaacatctcgaggacccgacgctcgacgacttcccctacttcgccaaagcctgtcagtcgtgccgtcggcagcgagagctgcttgagccgctgcgtgtcctcgacgaaggctgacctatgctacttctcctcctcgaccgaccagccgaggcgagccacgagattgtcaccgcctgcttctctgaattctacgtcggcgtggacagcaacatgcgcaacctccaggtcgactttcagtgcgtcgacgagcgggccgacgtcctgtgtcgggtcgccctcctggctgctcgctgacccccggcctgctcgtcgcttgctcttcagggctgccttgaaggaactcaagaagattgagaacgacgagtctgaggacgaggacgaggaggaggaggaggaggaagaggaggacatggccaaaactggaggagcggcggccgtctaccgtccggctgaggaggacgagaccagcacatcggccggcgaggacgatgactagcgggccgacgactcgcgggccgtcaatgccgaagttcggacgaagtctgtgctcgctgggtctccttcggaccaaagcctccgtcgggagcgttggtccatctgctgctgcctcccgcccggcggccagatggcgggagagagcgtgctctgcatcggccgaccatcttgcccggcgtgactaaacgagcggcaccgttcgagcgcactctgctcgtactcatggccggctgcagatgaccgcccagatacgcacgccactcaagggtctcttcggctcgggagcgccggtcaagagggcgcgtcgcgagagtcgacaatcaggccggggcgcttggcgagcgggacgcggtcaatatatgcatgtttgcctcaacacggtcgtcctcaccttgacttgcagagcgagagtatctaaggttggcacgcaggtgcccactcgagtactcgctgacggtcgaaagataaaaatcaggccggccctcagagcagcaggacgcgtcgcgaccgtctcgtgttgcttcccgctcctttggcccaccctcaactcaccgcccctcttcccctcaagacaagcccagtcagcctttccgacacgtcgctgcttgaccaggatgagcgactcggagtccgacgcctttatcgacgacgatagcggcagcgaggcctacggcgcgagcccgcccaagaaggccaagccgacggcgaagcccaaagcggttcgtccctccctccgaccatccacctccggcccgagcgaggcagctctgccgggccagactctgtcgagctatgcttgtcctcgctgggacggcgagaaccccttgctgggtgaggcgcgatgggcagctcgagctcatcaggctgacctcgctgctctggccgcttcccccctgcgcccctctctgctacccccgcggtccagcagaaggcatctccgaaggctgcagccaagcccaaggcaacggcgaccaagtccaagcccgcagccaagccaaagacgacaacggcggccgctaagaagaaggcggcggccgtcgtcgccgactcggacgactcggacgcgggcggggtcatgcaggtcgacgcgaccgacgacgagaccaacggcagcctagagaaggagcagccgctgcgcgagattggcggccaggccggcaagggcaagaacagcagcgagatgtaccagaaggtgcgtctctctttgatcgctcgactgcccgagacgcattgctgaccttgccgcctggcccccccgaacgctcgccgcccgcgcagctctcgcaaattgagcacattcttaagcggcccgactcgtacatcggctcggtccagcacatcacgcagacgatgtgggtctttgactacgagaacaagaagatggtcaaccggtgagtggctcccttctgatgggccgacgtgggcggtcgcttaactcgtctacactggcgcgctgcgctgcgcatcttggctcggtcggctcacctgtaggcagatcacgttcgtccccggtttcttcaagatctttgacgagatcctcgtcaacgcggccgacaacaaggtgcgcccctcgggccgcgactggcatcgttcttccccctggctgacctcgccaaccgcccggctgcgcagatcaatgaccctaacatggacacgttcaaggtgacgatcgaccgcgagaccaagtcgatctcggtcatgaacaacggccgcggtatcccgatcgagatccactcgaaggagcagatctacatccccgagctcatctttggtcacctgtgcgcgcccccctccttcgagcccccacttctgagcgccgcgctgacatgcgcgtttgcccggtcgccaccagcctaacgagttccaactacgacgacgacgagaagaagctgaccggcggtcgcaatggatacggcgccaagctgaccaacatctattctcacgaattcagtgcgttccccacctgctcctcgctcgtgcgctcaccccttgaacggtttcgctgacgtgacgcggtgctgcagaggtcgagacggctgacacgaagcagaagttcgaacaggtgttctcggagaacatgggcgtcaagtcgaagccgaaggtccgcgacgcctctcctcaaaatgcttgttgcccctcctaacgcattttcttctcgccttccagatcaagagcaacccaaaggccgaagagtacaccaagatcacctacaagcccgacctcgcgcgctttgggatggacgagattgacgacgacacgtttgcgctcctgaccaagcgcgtctacgacatggccggcaccgtcaagggcgtcaaggtctttctcgacggcacgcgcatcaaggtggacagcttcaagaagtacatcgacatgtacacgtcgtcagcgagcgaggccgctgctgagggcggcgggccggcagagaagattgccgtcatctacgaggcgatccagccggccaacaagacggacgaggtccgctgggagattggttttgcgctctcgaccgagcagcagttccagcaggtctcgtttgtcaaccgcatatcgacgaccaagggcggcacccatgtcgacgacatggccaaccaaattgcgaaccggctcgccgaccacgtcgacaagaagaacaagggcgccaaggtcaaggcgccgcagatcaagcaccacatgtggctctttgtcaacgcaatggtcgagaacccggcgttcgactcgcagacgaaagagtgcctcaacaccaagaggtcacagtttggcagcaagccggtcctctcggaagagttcttcaagaagggttggtctcctccgtgcggcttgtttctggctcaagactgacgaaaagcgcccgccggccagtcctcaagtcgggcatcgtcgacaacatcctctcgtgggccaagttcaagctcgacaaggatctcaagaagacggacaagggtaagcgcaagcggtgcgtcggcctgctgcagctcgtgctcgattcactcgactgacgcgcatgtcggcacccccgcaggatcaccggcatcctgaagctgaccgacgccaactgggcgggcgggcccaagggcaaagagtgcaccctcatcttgaccgagggagactcggccaaggcgctcgccgtcgccgggctcgacgtcgtcggccgcgaccagtacggcgtcttcccgctccgaggcaagctgctcaacgtccgcgaggcgtcggccgcccagctcacgggcaacaccgagatccagaacatccgcgagatcatgggccttaagcacggcaaggtctacacgaaccgtgaagagctccgctacggcagcctgatgattatgactgaccaggtgcgtttccgtcgcccgctcgccccgagcgccgatccaacgtctgacccatctcctctccgccgtcgcttcaggatcacgatggatcgcacattaagggcctcctcatcaactactttgaccacttttacccgtcgctgctcaagcttgacggcttcctcgtcgagtttatcacgccgatcgtcaaggtgaccaagggcaagaaccagaagtcgttcttcacgctgcccgagtttgagcagtggcgcgaggagaaccacggcggcaagggctggaacccaaagtactacaaggtgcgggtcctccgctcttggcaccctctcgaacccctgctgactcgctctcgcgcccagggtctcggaacgagtactgccgaggaggccaaaaagtactttagcgacatgggccggcacatgctcgcgttcgacacgacaaaggacggcgaccacgagctcattgacctcgccttcaacaagaagaaggcagacgaccgcaaggagtggctccggcagttcaaggtgcgtggggacgctgcaagcggcctcctttccgtgccacccagcctcctgaccctcctactcttcagcccggaacgcacctcgaccactcgatcaagacggtcacgtacaacgacttcatcaacaaggagctcattctcttttcgatggccgacaacattcggtccatcccgtcggtcgtcgacggtctcaagccgggccagcgcaaggtcatctacggctgctacctgaaaaagatcaagaccgagatcaaggtcgcccagctcgcggggttcgtctcggaaaagacggcctaccaccacggcgaggtctcgctcgtcggcacgatcgtcggcctcgcccaggactatgtcggctccaacaatgtcaatctcttgacacccgcgggccaatatggaacgcggcacgaggcccgtcactctcgacagtctctcttccccccgggtcgactcgaggctgactctcgctctccttgcgttttgacgcccgcttgacagggtgggaaggaccatgccgcagctcgttacatcttcaccgacgtcccgcgcatcaaccgggccgtctttcacccgtccgacgacgccctgctcgactacctgctcgacgacaacgatcggatcgagccccagtggtacatgccggtcctaccgatgattctcgtcaacggcgcggacggtattggcacgggtacgtctgccgctgatcattccgactattcgcggggaggggagtccggcgctgactcgaggacgcgcatcacaggctggagcacgcagatcccaaactacaacccaagcgacatcgtcgacaacctgcgccggctgatgaagggtgaggagatggtccggatgctgccgtggttccgcggctacgaggtgcgtcgtcttgagcgagaggccgctgaaaggcgactgctgaccattttgtttgccgcactcagggcgaagttacgctgctggctgacggccgctaccagatctcgggtaagctcaacaagattgacgacgagacggtcgagattgtcgagctgccgatccgaaagtggacgaccgactacaaggcaatgcttgaggctgccatggtcagcggcgagaagacgcaggcgacgatcaaggtcggtctcctctcgctagtgatgcggcccggttcacgttccccaggagctgaccctcctttttgcacttctgcgccagtcttacgacgagcaccacgtcggccagcgcatccgctttaccgtccagatgacggcggcgcagatggcgtcggccgaggctgaggggctcgacaagcgcttcagaatccacacgctgatgagcacgaccaacatggtctgctttgacgcgaccggcaagatcaagaagtacggcagccccgagcagatcatcgaggacttttacagcctccggctcgaatactacatcaagcgcaaggtgcgttcatgcgcgagggcgctcaattgggcgctcaattcctcctcgaccattgctcaccgtcctcgtctgcgcccttttttgacaggactacatgacgaccgacctccaagatcagtacgagaagctttcgaaccaggcccgcttcatccagatgtttatcgacggcgagctcaagatctcgggccgcaagacgtcggccatcgtcgacgacctcgtccggcttaagttccgtccgttccggacgaccaaggcggcccgcgccgcgggcgaggacgaggccgcgatggacgacgacgacaacggcggcagcgcgctcgcgagcgactacgactacctgctgggcatggcgattcggagcctgacgcgcgagcgggtgcgtcctgccgacccgacctgtcgccgacgtgctcgtattcccgctgaccactctctcatccctcccgcaggtcgaaaagctcctcaaacagcaggacgagaagcggtccgagctcgacgagcttctacgcaagtcgcccaaggacctctggaccactgacctcgacaacttcctctccgagtggcaggttcgtcgttactgggctggcggggactgagcgccggagctgaagtgacgtgctgccttctgctctgcagcttgtactcgacgccgacgctgagctccaggcgtctggcagctcaaagggcctcaaggctaaggccaaggctgccgcgaaccgcgccctcgccaagatcaagaagggcaaggcggccaagggtgacactgacgaagacgcctcgagcgacgagtatgtctcgccagtcaagaagcgcaaggcaccagtcaaaaagacggctccgacagcaatcaagtgcgtctcgagtgtttggcatctctctctagcgatctttccccggggctgactcttctttgcttgccgagcagagctgctgccgtcgacgatgacgacttgaagccgtcgccgctaaagaaggcgcgtgtcgccgtcgcgagctcgacaaaaccgaccttagtcaagccggacgacgactcggagtctggttggtgccattacttcccgaaggcagagaggcgatcgctgacaaaagcctacctcacaacagaggccaagccgactccgaaaccgacacccaagtcgaaggcggccgccaagccgaaggccaccctggtcgacagcgacgacagttcggacgtcccggtcaagcccaagccggcagccaagaagaaggcgacggcaagtttcgacagcgaggacgagtctggttcgttctaccggcctcttgcgccaaggaagctccttgctgaccctccgcgatgtccttctgcgcgacagacgcgcccaagcctaaggcgaaggcgcccgtcaagaaggcgacggccgccaagcctgccgtcaaggaccctgcggcaaagaaggcgccagcaaagaagaagaagaaggccgtcgactcggactctgacgacggcgaagactttggcgccggcgacgagtgcgtaggattgtcgtggtacgccgtcaatgaccgtgacgacgctgaccttcttccgcctgcagcgtgatggacctcgacgacgagcctgtgcccgcccggacgtcgcctcggaacaagcgggcgaccgccaagaaggccgtcgcgcaatacattgacctgtgcgtctcatggtcctggagtgcgttgtttgacaatcaagctgattccatcgccacccgcaatgccccaacaggtctgacgacgaggacgacgactaggccggctgcctctctctgcagacgctgctctgcgcgcgcgccccatcgcgccgcgccgacctcccttcccccccgctctctcctgatgacttcccattttacgagcctttcctactgtactgcttctctgttcaattcgatgcagcctctccctttctggtcttcacgagagtgcgactcgacagcaagagtgggcgagggagacggctaggctgagaattcagtctccgcccgcccgcctgcacgcgccgcctgccgccgtgcccctcctcggagagacgacagcagcagcaaccccgatccgagcttctctccctcatctcctctcgcagctcgaacggacgatgcggccctctgcaactcctctccgatctctccggctgccgcgtgcatcgacgtcggccgtccggcggtttgccgtctctcggccgaccggcgcccagccggcctcgacctcggactcgagctcgtctgctccggcccagccgtactctgctcctatcgcgcccggcgtccttccggcctacgacctgagtctccagtatatccgtgagacggcagagtcgaagcggtcgctcgtccctgcgctcgaggaagagatcgagcgcctctcggccgaagtcagctcgaatgggctgtcggccgaggagcgggtcgacttgacgaagcagctggcacggcttcggaagcgggtctggacgttcaagggcggagcagaccgctttgacccccaggtccgctacgagttccgagccgggctcggtgcgttgcatgcggttcaggcctagttttcgacagccttaaagctgattgaccctcttacgctccctagccgacccgacgaccgactcgttccgctacctcgaccaggagcgcttcgagctcgagggagcgctggacatgcacattcagaacatcaacatcatgcacgtcgtccccgacgtctgcaatgtcggtccaaagggcctgacggtcgacctcgcgatccgcttcccgtcgccgccgccaaagccggcgcccgtgccggacgagtttgggtggatcaagagcaagagcaatcggatcgtcgccgtccgcgacccgaaggacggcgaccggatcattgtcggctcgatgctgaccgtcggcgagacgcggcctcagcctgaggtcgagatccgctactttggcaccgaggccaagttcggcacgctcgtcatggtcgaccctggtgcgtgcctgctgcttcgtccccatacaagagctcatcttcgctcacgctgctgacttccgcttgcagacgttccatcgcccgatacgcattcgttcaaggagcgcatccactggctcgtgcccaacatcccgctctcgtcggcagcacgcgtcttcccgtcgcccgactttaagccgtcgtcggcgctccacaacgcttcgctccctgcgccggtgatcccatacctgccgccgcacccgcacaagggctcgccgagctaccaccgctacgtctttgcgcttcttacccactcggccgaggccgacccggctgcgctccgcgaggcggccgagggcgagggcgcttcgttccgcaaggtgcaggaagcggtcgtctgcgagaagcgggccaagggtgatgtcgccggcctgacgttcttgcgggccaagtacgacccggtcgagtgccccaagatttggggggaggtcatcagtgcgtctcctgtcctgatggcggcttgctgctctgcggacgaaagactcgctgcttaccgccctctccactcgctttgccacagaggaagacgaggtcaagtttgttactccgcagcgcaaggccgagtgggtcgttgacccgaacgcgatcccgctcaacgcaaacttccggcggccgtcgccgctcgagaagtcggcctcactcaagaagcgcaataaggcgctcctcttcaaccagcagctcggcgttgtgtcgaagggcgtcgacatggaccagcgcttcgtctcgagtgccgagtgggaggctcggtcaaaggctccgcgccgggttgagatcggaaaggccgagcttcgcaagctgtttggcgaccgcgtctctaagtcgggcctgccgatctttgacggcgccgctactgccgtcgagggcgagagcgagcagccggcagccgccgaggaggcgtccgaggcggcgtccaccggcgaggagcagcccccggcggccgagacgaagccttgatgatgacatgacccctcacaggcgtcttctcctgctctgcttgtcacctgcatcgacagtcaaagggaaagcgctcgaagggacgaggggcaggctggcaggggccgctgcgccgaccgacccttgcgggcgcgtcgccttgtgctcgaccggcctggctctccttgctgcctcgataccatctctccgagaccttccccctccttccccccgacccccttgacaagctacgtgcttctgtacacgacccgccacgatgcctctcaactactcgaagtgggaccagctcgaggtgcgtccgcggtcgagctcggtcgagctcagacctccgctctgtccctctaggagagcaagcgctactcacgcagcattctctctgcctatgcctacagctctcggatgactcggacattgaggagcacccgaatatcgacaaaaagagcatgattcggtgcggcatcagctctagcgagctcggcgagctcttcgcccttcctcgctagctgctgacggccggccggtccttttgtgtgacctgaccaccctctgcagctggaagcagcagcagatcaagcaggagcgggccgatcggacgcagaagatttcaaacctcaagaccgagattgcgctgaacggtgtcctccggccgcggatcatcgcgttgctcgactcgctcaagacgctgccggccaaggaggccctggcgacctactcgtcgctcgtcagcaagctcaagaacgacccttcgcccgagaagccccagacgaatgcgccgaaccagccgacgtacgacgtcatgctgctccacctgctcgagcaggtctcgaccgaggccaaggagcagtcgaaggcgggcgaggagcaggagaaggttgtcgagcggctggccgagcggcttgctttccacaacagccagcttgacgagcggactgtagaatgcgagcggacgattggcgagctcgaagaggaggccaagcgcaagatcacgagcgacgacatccacgagggcttcagctctggtgtgcgtcctgccggcggcgagcaactccccgtccgcctctcccctttgggtgctgaccctgccgcctctccttctcgtccaatccccggtagtacaccaacaagatcggcaccaactaccttgatgacgagaagaaaccggtggccaaggcaaaggagtcgagcatcgaggtcctcaacccccaggcctcggtgcgtgcgcctcaggtcaaccgctcggatgacgacggtccaggctgaccttctgtgcccactcccgcagtcatcgccttccggctcgaaagcgccggccgccgtcgacccggaagacgaggagctgcccgatgcctcaccgctcgcgctcaagttcacgacgatcccttacctcaactttgcccaggccttttcgtttatccagacgaacccgtcgatcctcgtcgagcagacgaccgactcgctcctgctcgaggcgttcaacgccgagattgccggcgagaaggaccgggcgcggcggtgcgtcgaaaagggcctgctcgtccagtactgccgcaagctcggcaaggacggcgtccggctctttttccagcggtgcgttttcccgcgagacgtcgtgtgctggcggtcgcagcggggaactgacccgccgttactgcgttgtcggccttcgacagtatgagccaggacggtgcggccggccagaaggcgctcaacctctttacgtcggacgtcgacgcgacctacaagcgaatggagggccgcgtccagcagatggcggccgagggccggggcggtggcgccgacggcgagggcggcgggaccgagcagattcagctcgttgccgagggtgacgcccagatctcgttcaacgtcccggacggtccgccgccggacgagatccggctcgagggcgaggggaccgaggagatggacccggtcgaagtccgaaagtttctcgtccggcagtggacgatcttcgagggctttgcgcctgaagtcaaggctgcgctcagagaggagagcctcgaggctgtcaacaaggtcctcggcgggatgagcgtcgatgaggccgagcagctggtgcgtgtctcgctgtctgtcgcttgagttgggcgtcccccccttccgctgaccacccgccgccctgctcctcaggtcggcgagatgaacgaggccggcatcctctcgttcagcgacggcggcgcgatccgggacgagactggcgcagctggcagcggtgcggcagacgaggagcagcccgacattgtcgacgagctcgactagctcttttccctgctgtgtgagaaagaagatctcatgagacgcttcgcaaggggaccatgtcaatccgaaagaagcccgctgtaccgcaggctactgtccatcgtcgcgtccccgccttttgacgcccagtacgcgcgctttgactgccgggcctggcgccggtcgtacttcttctgctgccgaaagcgccgctcgcggtcttcaaagtcagactcgtcggacgttgcgagcagctcgtcttgaccttcgatgtagaggtcggagccgtcgtcgtcgtcgctgcttgcgtccgatgacgacgacgacgtagagtggccgatctcgccctcttcaggcgacgacgtcccaccgccgctcgacttgcccttgcccttcttgcccttggcggcaggcgcggcagcaaacgcatcgccgtgcgccttgcgcttcttgcccgcaggaggcttgccgacgctataccgcgactcttcatcctcgtcgtcgtcgtccccgtcgctctcgggccgccgggccttgcgccgcgtcgccgccgttgtctggctcgccggccgcttgctgctcgccgtcgtcgtcgtcgtcgttggcttcgacccggcccgcgcagaaggcctaaacggttcgtctacaaagtcaaactggtccttcggcctcggccgccactcgtcgtcgtcgtcgtcggttgagctcgcgcgtctccgactcgacgacttcctccggcgccgccgccggtcgtcgtcgtcctcggacccgctcgtcgaaacgctcctccggcctgaccggtccggcgaaagctcgacgtgaatcgcgccgacctttgtcgtcctctcgcctccccgccgggcgccggcggcgcgcatcggcatcggcattgatgcgcgcgagctcggcccagcagcatcagcaggggtcggggtgaaggacgggaggtcgggcggcagggccgctgcgttaagagggatattgagccgctcttggaggcggccagagtcgtggaggtccttgagcgtccgacgctgggcgagcaccttgtcaccgggcaggaagaagagaggggagggggtcagtcaagtgctggcgtgtggcaagagagaagggggtgggagggacaaacctcaggcgtgacgcccatgatcccgaccaagatactcatctcgctcccatcgacctcctccgcccttcccttgccgctgtcatcgccgtatcgcgtatgtctcgcccctcctccacctgtcgaggacgaggacgcacgacgccgggcgatgccctcggctcggatgtatagccgcgacgtgaggacttcgtacgcgcctgaaaaggtcgacttgacgcggaggatgccgtgcgagccgcgcgagatgtcgttgcctgcaggcaagagaggggagcgtcagtgcgtgcgagcgggcgtatgagaggataggagcgggtaggactgactgttgtcctgcggatcctcgatcgagaggaggtacctctgtcgctcgttcgaccagcccctcccctccttcgaaaagtagtagccaccctcgcggagcgcaatgcccgtatcgtcatagccgaaatttttgccgtagagctcgaaaaactcaatgagcaagacgccgaggttctttagcgggtcgagctcggctttgcggactttagggtggagttggaggaacgaaatgacgaggcagatgacgctgtacgagccgaggccgccagagtagacttcgttcatcccacgctgcgagaggaaggccttgatgacgaggacgagcggcttgagggctggcagggctcgaatgtagctgttgacgatgaggccggctgagatgccgttcgactggttgatcgagatgtcgactgggagccggcctgccctcacgcaaacaaatcgttgggtcagcacgctctcccccccaccccctcccccccacgcgagaacgcaccaaacgacgagataaacttgacgatcggcacctttgcctttgcgatcacctggatgttctctgcgagatttgcgcggcggaggacggcggcgagcgtatgaaggaccgagaccttgttctgcttgtccatcgaggacgactcgatgacgaggtcaatgtcgctgtccgtccgttcgtcgtccagcaaagggggatcagcgagtgtcttcttgcgcagcgagcacgagtctcaaagggtgcgaagagaagaagagagagatgacgcataccctgtagggaggtacaagcccgtttcgaacgacccgaacggcttgacctgcgcatcgcgccattgaccctggactgcgagccgaatgaggccgacaatgtgcgagcgggtcgcgtgctctttggcggtcggcgagatgtaggagacgaaggaccggatctcatcgtttagcctgcggaagagggcaggagggcgttggggttaatgggagaggaaggagggacctggctgggctgctcgggggctggcggtggcagatgggagaagatgggggcgcaggccgggcagcgggcgggccgtcagcagactgtaatgccggccgacggggaagggtgtgtcgctcgctctgacgtacctctctcgctgtgctagctgcgagggatggtcgtgagtgggaagagggacgttgccttggactgagctgcttgcgaagacggtcagcgggagcgagcgaactggaaggcaaacgacgactgctcggccgacgtcgaagggaggagcccgccgcgcacgcgcagcagcaagcaggcgggcgacgcgctccggggcttgccggtggctggcccacctgtcagcccaccgactcgaacctcgaccttcacctgctgctcgtcactccctcctgccgtctgtccgccgcttgtgtcgtcagctgctgctcttcgccgctgctctgcccgcttgggctgacgagtcgttttcatcatctctggccccggtcctgccagcaggcgacccctctgttgacgtcccgccatgaagccctcgctccgaccacgccaggaggctcccaaggcctactacctcgatatctcgctcgatgactttgacccgccgatcgtctacggcgaccaggcagcctggtcgacgcccaacccttcggccgagccggcgcgcttcaaccagactggcgacgacggctggtcgcaggggacctaccactcgaccgtcgtcgagggcgccgacctcgccttcaacttttcaggtcagtctcttcgctcgcacggaccgggctcggatagcagggagctgccggccagtctcgcagctggatgctgcttggtggtgcggttcagcatcgggccggggctgactcgcaacgtcgtccgcctcacccgtcgtcatcccctcttcggttcaggccgctcgctcgaagtctacggcacctcgaccggctccaacgcagcgttcgatttttcgctcacctcgctctcctccggtcagcccatcacctttgcgccaaacgcgagcttgcccgctggcgtgctctttgccgccgctggcctagacccgagcgacgcgacgacggcgagggtcgtcaaccgggccggaaacctgacggtcgaccgagcagtctattctgcgccggtcggcgcagaagggtgcgtcctgtcctgttccggtgacggggcgaccagattgggtctctgactggcctctgaccgaaacttgctcgcagcgcctccctgacccggacggtcctcgatgagacggcgcccgagatctcctactcgggcacgtgggactcaaactccggcgacctcttctatggcggatcgacgacgtacacgaacgaggacggcgccggcttttcgtttaactttaccggtcaggcgcagcgtcttccgtcgcagctcttgcaaaggactgccactgacagcgtttgtcctcgacccgctccctcaggctcggccgtatacatctatggcgaccaggtcaacgaccacggcgacttccaagtgacctttgacggcgtcccgctcgactacaccctctcgggcgcgtcgggctgcggcggcgcgtttggcaagacgtgcgagaagctcgggacgctcgcttgggtcagggccgggctcgaagagggtctgcatacggtcgaggtccggaacgttgccggtgccaacagctcgttctttggtgcgtctgcgtcctgcgcgaggcgccggtgggatgttacccgcaaagccgactccgtgttgactgctcgaatctgaattccctgatgacactctctcccttcctttgcatgctaacagatctcgactacgtcatgtacctcacgccctcggcctacccggccgccctcgccggctcgacacccacctccacctcggcctcatcatcctcggctcctgcctcagcagcatcgaccagcgctccagcgagcacgccaagctcgggcgccttcgcgcgcgccggcgtgcacgactcgtcggccggcgggatgcttgcgctcggcgcgctcgggctgtgggcggccaggtcggccgggtgggtttaggcgaatgcgagcctgggcgagcccatatagatgccaatctctcgtctgtccgggagctgtgcatgtctgtctcgtcgtgcgtctgagagactgtcgaagagcgtcctctcggcctcggtcgatcgcaactccgtccctccgagcgtccgctcagcgcatccatctgtctgtcgtccgccatcatctcgcctgccaacaactagcccgtgctcgccttctcttgacctatccatacccagctactccgcctctcctgcccgtcagccgaccacccacgatgccggccgacctccccatctcgcacccggacctgcccctgacgacccaaggcaagcgcgtctcgcagctgatcgtgctcgatcgctcgcgcgtcgacgagtacaagcggcaccaccaggccgtcttcccagacgtactcgccgctctgcgccgggcgcacatctttggtcaggccaggtgatgctcgaccgctagctgagaagccgagctgacgcctgggacctctcggctggcgcagactatagcatacacctgtacgacctcccggcgctttacccgcagccgattctgatcgcaacgatgaagtacctcggaaccgactttgcggccgacatgcacagcgtcgccgacgaccctgagacgaagcgctggtgggagctggtgcgtctgggcgagcgagcgagctcgagctcggctcctgtctctctctctctcccgcaccggcccggctgaccgttgctcaatcttcggccttgcagatggacccaatgcagcagagctttgtcccgaacgcgacaggctcggcctcgggccctggctggtgggtcgagggcgaggaggtcttccggctcgagagctgagcctgcgtgggctcgtcgagccggccggccgcgggcggcgtggcagagaggccggtcggccgggccgagccgagagcgtcgatgggcatgtcgcagcaacacgccgtctgtctgcatcggaagaggagggagaaatgccgcacatgagggacatgctcgccggcctgccctctgcccacgccgacctcaggccaggagttccggctcggctgcggcggcgtcgtcgtcccccctgcgagtcgaatgcgccgcggccaactcgctcggccgctcgccggtgctggccgcgcgagagcagcttgagctcgccgacgacgaccttcctttcctcggccagccctccttgccttaagaccagctcactcgcagggatcgctgcttcgcactctccagcacccgctaccgcacctcatctctgtccttgtgattccagccatgcccgaaaaagttgttggtcagtcgcttcagcccacctctcaggctgaacccgcagcagcagcagcagcagctgaccgactcatgctcctcctcgtccaccgttgctgcagtcatcggagccggcgtcctcggcctgacatctgccctctgcctcgccgagcgaggctacgccgtcactatcgtcgcccgtgacagtacgtcctctctcttgccgccgatggcctagcttagcttggcgttccaggtcggcgagaactgatcgtctgcccgctggccgtttgcttgcttgccagtgccgaccgatctgacctcgcaaggtgagagcgtcggactccctatgctgatacgtggcttaagcgggaagctgacgacctgtgcttgctccgctgcagcctttgcttcgccctgggcggtcggttcagcgctcgctctccactcgtattggttgcacggctgaccccaactcatgcccactacctctgcagggcgctaactggcacagcttctggaacgacaacccgtacgtcgtcgatgctcccgatctgccctttcgatgtcgcgattgactgaccgtctcctctctttctctctcgcccacagccggaccgccgcctgggagcggattgcctaccgcaagctccagtcgctcatcccgaccgggctcgtcatgaagctcccgagcaagcgctacttcaagtacgacgcgacgtctgactttgagcaggactggttcaaggacctcgtcggcgactggaaggcgctcgacaagagcgagctgccagagtgcgtccagcgtgtgcttcagactcgtcagagtggccgatcactgatgcctaccctctcttgcaggggcgccgtcacgggtgtcggcatgacgatcctctcgctcgcgccctcctcctacctgccgtggctcaaggcccagctcgacgcacacggcgtccgcttcgtccgggctaagatcgattcgctcgaggaggcggccgagcgcgtgccgggcgtcggcaaagtccagtgcgtcgtcaatgccacgggactcggcgcaaagagcctgattggctgcatggacgacgcggtcgagccgatccggggccaggtcgtgctcgtccgggcgccgcatgtcaagactgacatcggcctgcagggtgcgtccaggcactgccgcctcgaggtggccgtctgctgatcatccattctctcgtcttttctgctggccaggcttcgaggacggtcagccgacatacatcatcccccggcccgacggcctcgtcgtcctcggcggctcgcgcgacgtcggctcttgggaccttagcgtcgatccggcccggtcagagacgattctcaagcgggcgtatgcaatctgccccgagctgtcgcacgggaccggctgggagaacattccggtcgtcaggcataatgtcggcctgcggccgtcgcggcgtgcgtcccactatattctcgcccttcgacaggattcgcctcatgctgacgcgctcctcgcttgtgtcgcaggcggtggaccgagggtcgagcgcgaggtgctccagctgccgctccccgacccgctgaagcccaaaagttcgatgaccgagggcctgccgtcgttcgaacggcgcagtctcggcgtcgtccacgcatacggtgcgtgcctttctctgtccgacgtccggcacgagcaatcgtactgaactcccttgctcttgattgtcgcgctttcccgctgcaggcatcggtccggccggctaccagtcgagctggggtatcggcgccaacgtcgccgacctcgtcgacgagcactttggcaccctgccccggacgtcgaagctctgagcgccctgttctccctttatcgcctctccgttgtatagatcaatgacgctttccatgttcttcacggtcgattgaaggtcgagacgaggctggtcggagggtgacagagaggggtcgctcgctctcgatcaacagtcgcgtccgaggactgcaggcagacacaggctcgtctttgcaggcctcgagcgcgaacagagcggcaacaaggaccgtcatgccgctcacagtaacctagactgtccaacgtcgttgggcagtcgcctgttgaaaaggctgcccatcgtcaagcgacagcaggtcactgcgctgctgcggccgacggcggccaccttttgtctcttgggcgcggcggcggctcgacgcgttgtcttttccttcgcccgcctcgcctcgccttccttccctcttcacgccctctcctctttctcctctctctctctcactttctcttcgactctgcgagctcgaagccaacacacacacacacagtcgttacatccatccaccccgccgcacaacccctctctctccggcgcaccgtcaacaaccccctctcccagcctggcgcatcgcacctcggccttccctcttcgcacccccctttcatccaaccaccacccacttcaccgccagcgatgctcttctctaccgccaccgcccttgtcgcccttgcagcctcgccggtcctcgccgtcgcccctcaccgggcccagggcaacaagcgccacgccggcctcgccgccgcccggcgcgcccaggccgcccacgccccgcccgcccggcggaccgtcgccctcggcaagcgggcagacggctcgacctgcaaggcccggcaccaggacggtgccgccggcgcctcggccaataagctcgcctcgtcggccgtgcccgtcgcgagctcggtcattgcctcatccttccagccggccgcgacatcgcccgtcgtcgagtcggccgccgctgccgccccgaccgaggaggccgccgaagagcccaagacgactgaggccgccgcctacgtcgccccgaccacctgggctgctgctacctcgacctcggaggcctgggttgcccccgctcctagcaaggcggtgagtcgctattgttttctcgccgccttccctccctgtctttgtctctcgcgcgcgggcgcgggcgcgcgcgcctcgacgcgcgtgcttttccaccgcccgcagcgccgacctcttggcaaacccttggaagcgtcaacagccaacatgaaccgtcgtcattcgtcgagtcgctcagtcaacctcatactgacgcccttcctcctggctcctcgtcacagcccgcccccgcccccgctgtcgtttccaacgacggctcggtcaagaaggtcggccttgcctggcccaacggcgagtcggaccagcccaaggcctgggccgaggcgctcggcaactcgtggtactacacctggtcgccctggaaggtcgactcgttccccggttcgatggagtttgttcccatggtgcgtctcgcatgttgcctcgctcgctcgaccgagtgccgttggctgacccgacgaatctctttgtcgtagctctggggctggaagcagatcggcgactggcagcagaacattgccaactacgcctcgtggggcgtcaagaacgccctcttcgtcaacgagtgcgtcgctctctcctggagcctctctgacgatgcccacccttgctgacgtcactgccttccttccttgctcaggcccaacggtgccggtcaagccaacgtcgacccgtcgtcggcctgcacgctctggcgcgagcagtttgcccagctccgtcaccagggcatccgcctcggctcggccgcgcccgactctgcgccctcgggcaagcagtggctgatcgagttcaaccaggtctgcccggacgcccagcccgacttctgtgtgtctcccttttcactccttctcgcttcccgtcaatgacccgtctgaccctctgcctgcccttgcagacgttctccactggtacgacgtctcggccgaggacttccagcgctacgtcatggactttgtccacacgtttggcaagcccgtctgggtcaccgagtacgcctgccagaacttcaacggcggggcccagtgcacgtccgactacatgtgcgtcccttggtctgcatccatcgcctccttgcgccgtgctgaccctctctgtttactcctcgcagccacggcgacttcttcaccggctcgaccggctggctcgcttcgcagcctgaggttgagcgcttctcggccttctcgaccatgcaggacctccagggcgtcaacacggccaactcgatgatgaactccgacggcagccccaacgccctcggctggcgctacgcccagtcttgctaagcgcgcccgatcgcaatgctgcgtcgctcgctcatggttctcgccaaccccctcctcgcctgccgtgcgggtccagaggatccctcggtcgggcggaggacaacccgatacccccacctgtccgcttgcttgcctcgttccctcgtcttgcaatccgtacatacgtccgcctccctctccttctttgcccacttcgctgcgctctccgtcggatcccgcttttttgctcttgctccgctcccctttcttccttttccctctccctgattgcccgcgcaactggcttgcgtcttccttatgattctgcgtctattaccagcgaggagtaggcgaaagcaagacctggagcgatcacttagcggcgcgagagctagaatgcgcccaaaggtcgctcgaaagttcggcacgctcgctcaacagaccggccggacggagcggttgattctcatgagtgattggtgacctggccctagaccccaggcgtaaggtagtctgcgtttcggagagagccggcactccggccttcattacgaaacgccatggcgccctacttccaggccacccgccttccctcgagtatcaaccgtagccgcgacgcacgactgcgtgcgtccgacgacagtgcgctctcctgccatcctagcgaggtacagtacggcctaccacatggctttgcggacgcccgggacgttgttgcggaggacgtccatccgcagctggaactgcgagacgcggaagggcacgacgagagcagggacaagagtcagccgatgtcctgtgtcagagcgcaatttgcgggcgcaggatctgccgagccgatcaagcagcgtccagggtctacgtactcttgacgtcttgaagtcacggaggacacctgaggagggtcggcgaggcgggcagaggcgcaagaaacgagctcgctcggtcagccgtcggtatcagagcaggaacccgtcaggagcaagcgcgacgcaccccgctgcttgcccgtcttgatgcaagtattcttaatgagattcggcgcgctccgcctcgggagctgggccagccggtgctgggcccgcatgcggacctgatcgggcagcgtcacgttgcgggcgacaaagaggtaggcccgccggagggcctcggtccgcgaaaagatctggcgcgtcttcatgtcgcggaggacgcgggtcttgagcccgacctggactgcgagacgggacgagggagagaagacgggcggcggtgagacgggtcagcggagcttgagagagctgctcaacggcggcgcttcgacctaaagcgctctgctgaggcgacgtacgcattccgatgcagttgacgagcgacgcaaacatgctgggcgaggtgctggcaaggccgggcgagaaggaagagggcgagctggatgagggtacggagcgagcgagcgaaggagggccacagccggacgaggcgggcagtcgacggaacgacgctcaatcaggattctttgtcagcatcgtgatggtgcatcctgattgagctcggccggcggcccagcgcgggggcggcctcgctggaggagaggcagctcgactcccgccttgctgcattcgccatcacccgtctctcctcccttctactgccccttccgagctcgcagccatggtacgtacgacaagagccagccaggcgcagggtctgcttgtttcgcaaagttgctgacgtcgtcgcgctctcgctcgctactgccgccctgccctgccctgtctcccgctccatctaccgcctcgcaacctcggctctcgaccgaccctttcgctctctcgcccgcgacacctgaccccgtcgcccagttccgcaactcgtacgactcggacagcacaaccttctccccgcagggccggtgcgtgtcgttctacgaaggagctccatgctggcggcgagccgagcacctcgaactgaccatccgcccctcgtcgaccgctccttgctcaggcttcaccaggtgcgctcttcctcgagtccgcgctgcgtcggctaagctcccggctgagctctccttcttactttctccaggtcgagtatgcgctcgaggccgtcaagcagggctctgccgccgtcggtctgcgatccaacacgcacgccgtcctcctcgcgctcaaggtgcggctcccttcggctgatgagctcgcttttgtcggccttctggctgaccctcctacgcgttatgacagcgctcgaccggcgagctcgcgtcgtatcagcagaagatgtttcgcattgacgaccacgtcggtatcgcgatcgccggcctgacgcacgacgcccgtgtcctcaggtacgtcccaccgcccgcctgcctactgtccggccactgctgactcgcacgtcctgcgctccctcgcagcaacttcatgcggcagcaggccatgtcgtcaaagatgatgctcgaccggccggtaccgatcaatcggctggtgggctccattgctgacagtacgttcagcgcccttgcgttgcgagcgtggccttaggctgactgacttccctgatgcgctcgcccgctccatagaggcccaggtcaacacgcaggtttacggtcgccggccatacggagttggcttccttgtcgtcggacaggatgtgggttggagccgcctgcgccaagcctcgacaggctgtacgctgaccgtgattgcgtgccttacctcgtccaggacctgggaccgcacctgttcgagttctcgccttcgggcaactcgttcgagtacgtggccatgtcgatcggcgcgcggtcccagagcgcaaagacgtatcttgagaagaactttgagtcgttcccggatggtgcgtcgtcggccgacatgacggctgctgagaaaaggtccctgctgacggtctcaatgccgccttgcagccgatctcgacacgctcatcaatcacggcctccaggctctgcgcgagacgctgcagcaggataaggagctaacgacggccaacacatcgattgcgattgtcggcccgttgacgacgggcgagccggcgccgttgcacctcgccaaggctcgcaagggcggcttccggatcgtcgagggcgaggacgtcgcggtctggctcgaccggctcgagcctgccccgccgcacggcggattcccgccggcagcacaggcggcggcggcagcggcggccccagcggaggatgcccagccaccggcgccggcgagcggcgatggcgacgttgcgatgcaggagtaagaagggcgggcgaaggacccgcgcacgggcagcgatgcgatggaggctccctttctatgtcggcggaacgggcgaggttgatgcagagatgttgtcgacaaaggtcgaaggctgacggctcgctcggcgctggctagtcgtcgctctggaagcatcgggcttgtatctgaaatggctgggtgcacgacgtcaggtgcttcgacctgctgctgtggcgacgcagacccagcgggaagaagcgacccgggcgcggggaatgagaaacgcgcctcgcgacgaccctcaccaccttccgccccgacctcctcctcccttcacgccaccttcctccccataccctcgcttgcaacttcccttcgacgtctagacgcaccatccgagcagagagacgcgtgcaaaagaacgacctcttcgaaggacaatcctcccggcgcctctgatcatggccgtgagtcctcgacgcgaagcccgccccttgcgagcgcaaggcggccgccatcctccgcctctccttcctctcgccagtcgctgacgctcgcaatgctctcggctggactcgacaggataccgtagcggcgctccagcaggagaataaggacgaagacatgctgtcggacgtcgtgccctcgcgcgccgtctcgtcaagcggaaaggtcggccggccccctgccctcctctcccccgcagctcgccgaccggcgcctcgggctctgcctgctgctcgatcacagactgacgccgagctgtctgacctgacctaacaggagagcgtcaagcctgaggatgacgacgacgaggacgtcatcccggacgactctggcgacgagcttgtcatgaacgaggcgggcgtgcgtgctctcctctcctcccttccgaccgtcttcggccgtctcggtgcccccgccccgcccgaatagctttagctgacatccgctgtcctgttcctgtgcttccctccctctcttttggcctcgacctcgtgctgctgccgtcgccgctctaacgcgatgttcgccctcggacgcgtccctcgctccgaaacgccgacgctgcgccctcgcagtcgtcaaatctctccccctcaaagtcaaaggcgctggacgccaaggacaaggctgctcgccggcgggcagagaaggatgcggccgcggctcagctccagggcaagcgtgctcagctgagcaaggtcaaggtgcgtgctcagccgtcttctcgtcccggcgcgcgcgcgcgcgagccctgcaatcttgctccgtgttccgtccacccgtggctggctgacactctcgcgtcctttggctcgctacctccgaccccgctcagacggccgactcgatgaagcgcttccagtacctgctcggccagacggagcttttcgagcacttccttgagcttaaggtgcatccccaccccagtcggcctcacgcgatgcgtcctcgtgtgctgctcagttcgactgacatgcgctcctcatctggctgcagaaatcgcgcgaccccgactttgcggccatgctcgacgcccaggtcgccaagaagcagagcaaggccggcaagggcaagaagaaggaggcgtgcgtcatctccccctgcctgcacgccgcctgccgccgccttaagctaatctgacttctcctcctttcgtagcgacgcccgccaccgtaagactgagcaggaggaggacctcgagctgatgaatggagacgatgaggacgacgacctgatggtcttcgaggagtcgcccccctgttcgtctgccacagtctccaccgcgcgcagctcaatcgccaagaagctgacctcgtctctcccgctgcattgcagacgtcaagggcggcacgatgcgcgactaccaggtgcagggcctgaactggatggcctcgctgcaccacaacggcatcaacggcatcctcgccgatgagatggtgcgtagcctggtctgatgcgcgcgcccgcttcggccacctgtctgacgaactttttgcgctgctcgcttctctccagggtctcggcaagacgctccagacgatctccttcctcggctacctcaagttccaccacggtatcaacggcccgcacctgatcgtcgttcccaagtcgacgctgcagaactgggagcgcgaggtccagaagtgggtccccggcttccggactatcatcctccaaggcaccaaggatgaacgggcgaccatcatccaggacatcatcctgccgtccaagtttgacatttgcatcacctcgtacgagatgtgcctccgtgaaaagacgacgttcaagaagtttacgtgggagtacatcatcatcgacgaggcccaccgcatcaagaatgtcgactcgctcctctcgcaaatcgtccgcgtctttgactcgcgcggccggctcctcatcaccggcacgccgctccagaacaacctccaggagctctgggcgctcctcaacttcatcctgcccggtgcgcttcttcttctcatgatagtacccttggccgtgcaactcgagctgaccctttactgggccacctccagacgtcttttcatcgtccgaggactttgacgcctggttctccggccgcggcgacggcgaccaggaccaggttgtcaagcagctgcacaaggtcctccggcccttcctcctccggcgcgtcaaggcggacgtcgagcactcgcttctgcccaagaaggagatcaacatctacgtcggcatgaccgacatgcagcgcaagtggtacaagagcatcctcgagaaggacattgacgccgtcaacggtgcgtcgtctcatgctgcggtggccatccgctgccttgtgcgtgcaactaactgtcatgctcatgaccctttgcaggcgccggcggcaagaaggagggcaagacgcgccttctcaacattgtcatgcagctccgcaagtgctgcaaccacccttacctatttgacggcgctgagcccgggccgccctacacgaccgacgagcacatcatcaacaatgccggcaagatggtcatcctcgacaagctcctgacctcgatgaaggccaagggctcgcgcgtcctcatcttctcgcagatgagccgcgtgctcgacattctcgaggactacatgatgttccgcgaccacagtgcgtcccggtttgacctgtccgggcctcgatgctctcgttgacgtatgtcccggcttgcagagtacagccggatcgacggaaacaccgcgcacgaggaccgaatctcggcgattgacgagtacaacgcgcccgactcggagaagtttgccttcctcctaacgacgcgtgccggcggcctcggcatcaaccttgtcactgccgacgtcgtcgtcctctttgactcggactggtacgtcttgccgatcgactatcgcccgccacaattgcggctgctgacgaccctcgttgccttgtcgacccggccgactgcaggaatcctcaggccgacctccaggcgatggaccgcgcacaccgcatcggtcagacgaagcaggtctacgtcttccgcttcgtcacgcaagacgccgtcgaggaacgcatccttgagcgcgcaactcaaaagctccggctcgaccagcttgtcatccaacagggccgggcgcagcaggccgctaagggttcgttatgcagagctctgctcctatgcgacggctcccgactgactgaccgctttgactcttttccgctacagttgcccagaacaaggaggacctccaggacatgatcctgcacggcgcgcagaagatcatcagcgcgaacgacaagtgcgtacgattagcttctgagggtgatccagagccgccagcgctgactcttgctcgctccctgacagcctccttatcgacgacgacattgacgagatcatcagccgcggcgagtcgcggacaaaggagctcaacagcaagtacgagggcctcaacctcgacgacctcaacaacttcaagtcagagtcgatggttaacaactgggagggcaaggattaccagaacgaggtcagcaccgacacctctctgctactgctctgcgccgaccgccgctgacgctttgcccggccctctatccagcgcaagggccacggcatgctttggatcgagccctccaagcgggagcgcaagagcaactactcggtcgacagctactacaaggaggccatgagcaccggaccggccaaggttgcaaaggctagggtcccgcgcgcgccgaagcagctggccatgtccgtccttctgtctgcgtcgtcgaccgctcctgcagcatgctgacacgaccctcctttgactcacagctccgacttccagttcttcccgccgcggctcgctgagctgcaggagcgcgagaacctcgcctggaaggttcgcaatcgccccggcgcatccttccactgcgtatctgctgactgcctcccttttctacctcgtcccctgagcagaaggagcagggcatgtcggccgtcttcccggacgcgaaggatgagaacgacacgcacgaggagcgcgaggcccggcgcgaggctgagcagcaggcgatcgactctggtacgcactcgaccctttctgcttgcatcggcgacctcgaccgaccctgagcgttccgttgacctcctgccctcgtacagctgagccgctgacggacgaggaggaggccgagaaggatgctctctcgctcgagggtttcacacattggcacaaacgccaccttcagcagttcatcaacggcacggccaagtacggccgccgcgcgttcgacctgatcgcgcaagaggttgaggccaagacggccgccgagtgcagagagtacgctgcggtcttttgggagcgctaccaggagattgccggtgcgttggccttgcagctctctcgggctctgctgttctctagctgccttgctaaacctgaacgctcgtcttcccatttcgtgcaggctacgagaagctgctcgacaaggtcgaagagggcgagaagaagatccaggagctcagggcaacggccgagcgcctgtcgcgcaagatctcgagctaccagttcccgatgcaggagcttcacctctcgtacggccagaataagggcaagcagtacaccgaggaggaggaccgtttcctgctcgtccggctcgagcactggggcctcaaccgcgaggacgtctacgagctcatcaaacacgatgccggcgagtggccgctgttccgctttgattggttcctcaagtcgcgcacacccgacgagctcaagcgccggtgcaacacgctcctcaccatcatcacgaaggaggaggaggcggccgagaagctccgggcagccggcgggcccaagaagggtggcaaggtgcgtccagcctctctgctttccgcagcgctttgcagcaactgacttcctggacgattgccctttccagaagcggaccatcaacgacgtcgccgactcgtcccgcgcgagcacacccgcctccggggcggcgccggcctccaaggcaaaaaaggcaaaaaagtaagagtctagacccccgactgcccccttctcgtcgctccccatctgtctttcggcttctctttgcccccgcgcgatccgaccccccttgttgcacacccataccgcttcgatcctcatgatctccctttccttgcgcgcttaaacgacagaggtttcatcacaattcggccagtctgaagcgctcccacgagccgtcgagcgcgcggccctgctcgcgcacgcaccacgcgctgaggacgcggatttttgctcgcggggacgacacagcgtccgacatgcggcgataggtttcgaggtcgtgctggaagcgcgggcagtctgggtcgagcagaaggacggcatcccggttgttctgcaggaggatcttgcggaaggactcggaccgcgtcaggtcgagccgctcgagatggctgctcgaccgcgagcggcggagctgatcgggggatgacagtgcgtgtcgcagaggtagaccgacagcaccgggcgtcgtgccgccgtgtttgtccggccggagggcgacgtcgtgagcggaagggagatgaatgatcgaggactggaggacgtggcgcagcgtcgaagcggctcgcagaaggtaagaaggcctcgaaccaagtcctgcgtcgacggccatcgccggaatcattgctggggtgcgggcgagcgcgcatggcctagccggcgagaaggaggcgccgtcgccctcaaggcagatggcgctgtcatcgaccttgcgcgagcgagcgagcgtcgtgcagactgcgatggacgcagcaggcggttgctcgaccgagaagttcggtgacgtctgctgaaggggcatccgcttgcgcggtgtggccgggtctggagggtttggctcgagcttgcaaggcaaggccactttccgaggctcggccttgatcaaacggaggcggtcgtcgtcctcgtccgagctcggctcgcgtgtcgtgctgcgctgcgaccaattcatgtcttgatgctgcttcctcttctggccgacttgggagcaaggccaaggatcggcagcagcagcccaatctcgaggcgttggccgtacagtcgacgggacggagggccggagatcggcgcaggtacgcgtcgtcgagacttgctggcgagtcggagatgattgggcgccagggggtgacatggcgtccgctcttggtgagaagagggcgccgatgtccagggaagcgttcgtctctcgctgcaactcgaatcgagcgtcaaaggatcctcgcacgtcggatggctccttgccgagggctttcagagcggtcgacttgtactcggccgccgacatcgctagaagcgccgcagaaaactgtcagcttcgaagcgcagtgccaccggcgaggtcattcacgaaagacgtaccctcagtccaggccttgccaccattggccgacttcggagggtaaaccttgacgatcctcggccagcgaagctcatagtgctgagaaacacgttgcggccgtcagcttctgtgcagagatcaagcgaggccatcctgcagtcactcaccgaagagctggccatcttctggaagctcgcgccatagagttcgatgagcagcggctgccgaagcagcacggtgggcggcgtcacgccagccggcacctcaatggagtgtccaagagtgctcgcgcccttaagggtgtcgaaaacgatgggtgagcgcgcgactaaaagaagcgcgacttcagacgactttcactgacagagagtccaacagcccacggcgtgcatcggtcggcgagccaggcgttccagtggtcgagcgcgtcacgcgtgagaccgtacgaagccttgaagagaatcaggaagcgcggccgggactgcatgttgcaaatgacattacttgttagccgctgtggtgccgttgagtagcagaggttcggaacggacgattggagactcgagtcggacgccaacgtgaaaggtcgtgaggacggtcggagccactatcggagccgcagataggttagggcgaggagatcgctggagaggcgaccgtctcatcggaggacgcaccattgagctcgcgcgcgcgctttgcgtcccagctcgcgcccagcagtacgaggtcgaccgtgtcgccgaggcccgggatgtaatcgcgcttcatcttctgccatcggtgttgaagataagttgccttggcaggcttcaggacgaggccctctgcaggcgggagggctgaggtcagtctcacgcccgagagtgagtagatgatgacgggcgtcacggaccctcgaagcgctccgcagaggcgccgaatgcggcttcgagctcctgcaggcaagaggatgtcagcaattgcttaattggggacgagcgcgagctcggacggacctttgttgccggtagaaggccgcgagagatgtggacaggcgatctcgcggcgagcatcgaccagcccgggatgacacagatcaggctctcgagcgcagcccttcgatcctcataaggcgtctcgacgagcgacttgccgtccagctcaagcacgtcgaagaagacgagctgcaggtgcagctcctttcgcacgccctcaggtgacggctgcgactcgtcgagatcgagatcgagcagcgcatgccggtcggtcaccttgcgctggccgctcgacctccaagccgctcggctgtcgcctggacaccggacgattttccagaactcctcaattttgcccgtccgctcgttgaagggcaccatctcggcctcgagaacgaccgagcgcgcgaaggttcgaggcagcttctgcgtggtcagagcccagctcaggagcgagggcgcctgcctgatctgcagcggtacatgtaagccgagcgcggtgtagatcgtgctgtcgggtcagattcgcgtcagttgtcggcaccggtgcagtctgttttgaaatgtctgacacacgcgtgcgtcgaggctcggtccttggtgctgtcgcgcgacgacttggaaaagatggtgatctgcgagccgagtggccgcgagaggtcgaggtgaatctgcatcctgtagacagcgaggaaagagcagaaatcggtcagcagctgccttgcatcagacggagcgctgcttgacgcaccgctcgccgtcgtacttggtctcaacccagagcgtgtcgacgccgtcgcgagcgtacgcctcgatcgagcgctgaaggtgaatcgtcttctggcattttgggatctgcgacaaggttgtaaaagttgtcagccgggacgagtacgtttcgctcaagaagaaagggctgccaggtctgacttgcacgttgactccaaccctgacgcgaggggtcgccccgtgctcctcgaagtcttccagaccttgcatcgcctgccgaaagtcggcgcagcgctgccaaatacgaatcgccaccgtaccaccggcgagtcggagcgcatcaggcaggtcgagcaagtaccgcgactttgagtcatactccttgagcgagacggtccgctgggccgtcggcggagaagcgagcagaggcgagatgtcgcgcaggatgagctgagtgaggagagaggcctgaaacggatcgatcgggtaaaggaagagttgccggatgacaacagagacgggacgaggtcttctgtgcaagtctgggtcggccaggaacggaagttggtgtcaactcgcggcttcaggataagcgctcatcacgacgacgcacctcggatgtacgaggaggaccagctggaatgtgcggctagttcatcgagcaggtcattaacctggagaagtgtgaggctcgtgcccttccggctctgcgcggacgatagaagagagtcgtcagtcctgcgtactgcgttcaggaggcgagtcggaggctgcacgctactaaccgacctacaccaccgcccccaatcgcgtccgacaacctctccgagacagacagggatctcgcgctgggcgtactggccgccccaggcttcaccggcgtcccagcggccgaggacgtcggcgtcaaggccaagctcgcgagcgagagccgctcccagccggtgctccttgaggtcgtaccgtcgctcagcgtcgagatgcggcaggagcagattcagaagtgctgtcctcagacgggtacgcgtctctggttcgaagtggtcgaggtcgaacaggggcttgagcagggccagcacctgcgtccggggaggcgtcggcggagcccgggttgtcgacaaacggcgcgcgacggggagggccggcaggttggcgatcttctgtaggattgaggtgacgctggagcacgatcgtaagcacgccgtcagcctcgtcaagcttgagcaaagtgaccggctctcaatcgactcacaggtcgaacgggaggtcattggccggcggcgtcatgacgacgcgtccttcgaaggaaggcgtccgggcaaccggcgccaggtcggacagagtcgagcgacaggctgaaggtgtagattaggcagaaggctattgtgcgaccgctgcatggtcgctgacgagcgatttgacgagcaggcggcgttgctgaggaggcgactggacctgctggccgacggagaggcttgaaggcggacgcgtcgcgcgacgccctctccttagggttgtgcttatgtaagcgaccgcgagggcctcggcccgcgtgcgcgcccggacggccccgcttttccgtgtcttgacctcggaccccgacaacccggcgtcaaagccctcccgacaaccatcatcgctgcctcgtctaccttccgaaccacatcctcgctcctctgcatcgcatattaggaccgctccctccgctcattatggtccgtcttttgttgctcttgatggctctggccttccttgtcttgtcactgcctcgctgacgccgctctccctggcacccgcaggccaacgcatcgaccaagaagacggctcagtcgaacgcgacgttgctccggacgctgctcgtcgcgccctttgtcgccgccctgctgcatctcccgcttcgctggttcattcgctcccgagccttcgtctcgtggccgtccttcatctttgtcgtcctcgtcgccggccaagtctttggctggcgcttcctccagctcaacgccaatgtccggcgcgacgcgcggggcatgatgaagagcgccggcgtcgacctctcgaccgctggcggcctcgttgaggtcattcaggacttgtgcgtccctctcatctctccgaaggctgctgccgctgggcgcgcgactcgttcctaacccatccccttccggccggcctgccctcgcagcatctacctctcctccggactcaacctgctcgccccgatcatctcgttcaagctctactggctgctcgtcgccgtcccggcgctcggaggctacaagctctggatctttgccaagccgttcatcgcccagcagacggccaacgcccagaaccgggcgaccgcggcaatcgacggcgttaacggcaacggtgccggtgctgccgccgagagctcgagcaagcgggccgagaagatgaagaagaagcaggagaagctcgagcgggcacagactggcggccggggcgcccggcgctagatccctcgatcatcaaaaggcaaagctcggtagacgtgtactctggcatgcgcatcagaacgcaaacagcttggcgaggtgaacctcgaggtcgagcctgcatggcagcgtccggggtgtcagcgctcacgccgctggcgagtcgtcgctaacgaggactgaccagccgccgccgacgcggatcatgaccttgacgagtttgacatcgcccccgacagctgacgagtgccgaccgcggtgtagctcgagcgcctgcattaaaggagggagattcagacgccgggcgaagggtccaacgctcagaccggagcgcaccttgcaattgtagaccttctcgtccccgcgcggcgaaacgaaacggtactgggccgtgttgagatcaacggcggcggccgcctgacctcgggggaggggatcgacgcgctcgacagcccgaacataggtcgttccgccgttgacaatgcgcgcaatctcgaggtcgagcagattaaagcgattcggcttgtaggacgacgacgaggcagtcgctccgggggacaggccgaccggacccaggagggatccgtgcgaaggtgaccgagggatgccagcagatccgtgccggaaggacgacggcggcgagagcccgagcgagctcgtcgatgctgaaaggtggccccgagaggacgagcccgggagagatggccggcttcgcgggggatacgcatggccggacccggacgggcttcctggctcgggcgtcatcaatcgcccgcggtagaaaggcgacgggggagtctgcggccgcccgctgcctgggaatgaggaacgtgtgaggatagacgacgagagctcgtcgccggcgaagaacgacatcgagctgctcttcgacatgcggtggataggccggcccggcgacgctggtgaagccaaagagccatttgagtagtttgacagacttgagctcgaccgcgggttgtcgtgacagttgcgcgaggagggtcgcggtagacgactgggagtcagctcgttgcgagaggccgagcgagggggcaatctgttgctggccgtcggcgaggtcgcgttccgagactgcgggcgaggaatcatgctgggcgtgggcggccgggcgagagagcgtgatggaggacgttctgggggtgtcggtgtgcttcctcgagccgacagcagcagaggctgagaagtcgagggcgacacgtgtcgaccggccgttccgtgcgaggggctgccgtacgactggctgagcatcgtcgaggacgaccggcgtccgatggggcgaggttcgggcagaaaattatcctcgagcttcgtgacgctgccgttccaccttggccggagcggcgtcgtgaccggtgggtgctgcgaggcagcctcgcgaatgggcttccgcaaggtcgaagttgccgttttgctgtcagcgctggtgaagcgcgagaaatggggcgaaggggacgcgaccgaggagtcgtggccggttgactgactcttgccaccgctatggctaccaaagctgctcagcttgtcgagcatgcggttgaagggggacatagagcgcgagagcgacgacgcgaccgatgctcgccggcccttggattcggccggtggtgtcttgacgcggctcgagagcgaggtctgctgagatctctcggatgagctggcatcgtcggtctgggtcaacgacgatggttctcgtgctcggtgttgccgagcgtccggcacagacgggggcggaagcggggtcgctcgccggggtgggctccgggcgaggagccaaagatgagcagaattgtattcgatctcgaggcgccccagtctatccgtcagcccgcgccagcggaggagaagatctgcgtgcctgaggttcgaactgtatgttagcgagtgctgcccgcaacagcctccgctcagccgaggcaaaacgcacttccgtagcgcctccccgttccgcgtgactcgctcgcgagagcccttgtcgaggattaagagaacttgttcgatcgaaggtcggtaggactcgattctggccgcaaatgacttgaggcttctctcgaagtcggcgagcgtgacgtccggaacggcggccgggtcccgccatgcctcgatgcctctgtactggagcagcttgacgtgattgagtacgtcctgctaggcgtatcaatgagtcagcccctctgtatcgaattgctgctcccgcgccgactgacctggaggttgatcatcgcgttttcgagcgaggccatcatccctgtcgcttggctggcggccgtccggaactgaccgagccagcggtcctccttgagctcctccctgagctcgtcgacgtcagcaacgagatcgcgccatcgaccctcgacgtcgtcgaagtcttgctgaaggctgatctggaccaattggcctgccgagagcgacctcacttccgcctgtacggcgggcagtaccgctgagacctcggccagaagcgcgtcgatggacagcagagcagtctcggcagaaacggtctgagcgctaccggcactcgtactcgggccggacgtgtggcggagctcttgtgcctctgtagacaggtcaagcggtgcggcgatcagagtccgggtcatgtcagaagcgaagcgcagcggcgggcgacgacaggcagccaacgagacgcacgaaagatgctcgtctgcagcttagacagcgtctgctgaaggcctccgatggtcgtttctacggcccgctcccgaatgtgcctgcttgacgaggacgagggctcagcgccgggcgggaagctctgggaagggaggtcaaacgcactggtcgctctgcgctgcgaaggtcggcagagtcgccgagtcgagcccctccgactcgagccctgaagcgagcatgatggtcgatagcaagggtattgcgagcgtgggccgggcccggctcggctgctggcgtccaggttgccgctgtctacgatgaaagggaggctgagccgcaactgcggaggccgggtgagctgccttgaggggcagagctggaaggccgcttgttgggatggtcgagtgcaagcgagtcgagcagtgctaccgcaggctgaagagctgtattcccagctgtccagcagaggggcgaaaggagagaacggaggctccaggccgaatgcagatggcagttgaggactctccggagtcgtcacttcggagggacgacggctcagcccggcaatctaccaacaccgacctcgccgccttgcccgcccatccctcctcttctcctcttcaactaagcagcgccatgtcagcttcagactcggaagacgagatgccgccgtaagtttgaagacttccagagcgggcagatggtcgggaggtgaccgggccgatgctgatgacgctgcctccgtccgtcgacctcggccggcagtgtcctcgtcggcgccaaggtaccgctgactctgctgacgggagctctcggctcgggaaagagcacgctcgtccagtgagtacctcttcatcgcctgtcgccatgctgctggcgcagtccgtcgtttctaccgtgtgagctgactcgccggcgggctcgcaggcacatcctcaatgccgagcacggccggcggatcgccgtcatcatgaacgagttctccgacacagctgatatcgaggcccgtgccatctcggtccagtcgagctcgggcgccatgacgacgcctctcttgacgctgcccaacggctgcctctgctgtgcggcacgcgacgatggcttcgctgccatccaggagctcgtctcgcagcgcggggctttcgactatatcctgctcgagacgaccggcttggccgatccaggaccgatcgccgagagcttctggcagaatgaggagtgggacgcggatgttcggctcgacggcgtcgtctgcttggccgatgcgatgtgggcgaccaaggtgcgcagtgatgacggttgctgtcacatccgattgtcgttgacaagtctctcatggccttccttacagcaagcaaaggatgcgtcagaagtcagcggcgagccgccggaatgggagaagtgagttgccggagtgcctcctcgacgcgaacgtcctgctgatcagagctttgcgttgcgttcaggcaaatcgcctgcgccgacgtgatcatgctgaacaaggttggcgatgttgacgctgcgcaagtgacagaggtcacgagcctcatccagtgcgtgtgcctcatcctcttcagcagtctagcgcacgacactgaccgaaggcacatggtcgctcagcaacatcaatgcctcggcacctatccatcaaacgactcggtcagagatcgatctctccctcatcctcgacatcaaggcatactcgcccaaccctcaagagtcgccgctggtgccccagatccggtcgcatgcctcgtcagtcgaggtcaaaagtacttctacactcgcagagggcagcagccctgcgccctcccacgcacacgctcacggcgcgtcaagctctatcaagtcgcttgtcattcctgtgtcggccgtcagcgacgaccagcacaaacggctcatccgctggatccagacgctgctctgggacccggcggctttcgccccgaacgagagcgaggagcccgaggtgcttcgcttgaagggcatcatctggtcagcagacgagcccagtcgcggctgggttctccagggcgtacggggcgtctacgagctcgaagacgtgtcgcgcgactcggccgatcaggccaacggcaagattgtcgtgatcggtcgctctgtccagaatctggagagcagcctgagaaccgcgctcgctgcgctcacgccgatgtgatgagcttgcaagacctggcgcaggcggaattgccaggcaaatgagtgaccgtgagcgctacgtgctcaaaccgatgcgtactcgcgcacgcgcaaccgctctgactcggcagccgcctcgggcgagctcgcgcctatcgcctcgttccgcatcgaccggcctgctaccatctctttcaaccctcagcccgcctacctctaccttgcgcacctcgggatcttctctacctcaacgtacttttcgcttgctccaaccgcaaccctcagaccagccctcagctgcgatgctccgcctcacgcgctcggccgcgccggtatcctcgctcctccggcgagcattcgcctcggcaccgcctgcggctccggtcctcgacaagtcgcgcttcgtcctgtcgtacgacgagcagtcgtttccccgcggcttctcgtgcagctcgacccacgccggcgtcaagaagaagtccggcgctctcgacctcgggctcgtcgtctcggccgcggccgccggccggacgtcggccgcagcttgcttcacccgcaacgtcttcaaggctgcgccggtcaacgtctcgcgcgacgtccttctcaacgagggcggccgggcgcgggcactgatcgtcaacagcggctgtgcaaacgccgttaccggtagccagggcatgcgcgacgcccttgcgatggtcgagtcggtcgactcgctcctctcgaccaacaccgagggccaggcgccgtcaaagaagacgctcgtcgtctcaaccggcgtcattggccaatgcctgcccatctcgcccatcctgtcggccatcccgggcttgcactcgtcgctggcctcgacgccagacgcctggcttggcctcgccaaggccttcatgacgaccgacacgttcccgaagctccgcacccggaccttcaagcttaagggccaggaggttcggctcgcaggcatcgacaagggcgctggcatgatccacccgtcgatgggtccgccccagccggtcgccgctctgcacggcacgcttctcggcgtcattgcgaccgacgccgcgatctcgcccccggcgctccaggccgcgctcacctacgccgtcgagcgcagcttcaactcgatcactgtcgacggcgacatgagcacaaacgacacgatcgttgcctttgccaacggcgcgagcgggatggaggtcgagatcgacgagcacgaccccgagtttgccgtcttccgcgacgagctcacctcgtttgccgaggagctcgcgcagctcgtcgtccgcgacggcgagggcgcgaccaagtttgtgaccatcaccgtcaaagtccgttgacagtatatccaggcgctcaaatgccgatgcttgggctcgatcctgacgcgctgtgctccatttgcagggcgcgcccgactacgaccaagccaagatggtcgcctcttccatcgcgacgtcgtccctggtcaagacggcgctgtatggccaggacgccaactggggccggattctctgtgccatgtgcgtgttattccatgtctccctcgctcgagtgagagccttgactgatcaccgccgtctaccatcagcggctacgcaccgctgcctcagccgtcgccaatcgacccgcgtcggactcgggtctcattcaagccgaccgacggctcagccgagctgctccttctcgagaacggagagcccgtcgagttcagtgaggagcgcgcaagcgagatcctgcaggctgaggacctcgagatcgtcgttgacctgggaggcgagggcggcggtgaggcaaagtactggacgtgcgacttcagccatgtacgtcgacttgcaacgacacaaccatcgccagattcgggcgctgacccaaagcccgcactcgcttgccttctgcaggagtacgtgacgatcaacggatcggtgcgtctcactccagcagaacccttctccctgccggccccaaactgacacgcgactctctttttcatcacgcagtatcgttcatagatgttgccgatataaaggactcgcaacatctgcggcgacgacaggcgcgagtccctcgctccgcagacggcgctcagtcccactcgagcttgccagtgctcgagaccgaggcaatcatgccgccgccgacagccttgctgccgccgccgcggccctttttgtagatctcttcaatccttgcctgctcgagccgcttcttgtgcgcggcgagggcccgcagacgctccgcctccgagtcctgcttggccgccttcttggcctcggctcgagctgcgttctgccgagccttcttggccgaggcggccgatgcggcggcagccgttgcagcggcagacggcgaggacgatgcggagagaagcgggttgccaagcggctctggcattgacaggagcggacgacaggattagcaaagagctgagcactaagtagaggcaaagtgaccaactcttagctttgcccttgacaggaatcgtctcccactgctcgtcctcggccgcaggtgcctgcccccagtcgtcgttgaattcgtcgacgagcggggccgcctgcgagaccgtcgcaagacgcgcctccgactcgtcttccgacgacgagctggtcgataggggcgatggcgccttgttcggctcctcgtacgtggtcgacgacgaaatcttcatgacgcgcgctggcggaaggacaggaggcagcatgctgtcggacggagggcgcataatcagcctgctgcgctgtttgcctggcggaaggtgagatgagagcggtacgcactcctcaacgccgctcgtgccaagccgtccggcctcgcgctcggcgtgcacctctgccaggggcttgctcttgtcttccgccgcgagagccttcagcttgttcgacttcttcttgcccttcttgacgacctcggccgccgaggaaggcgcatcgaccgaagcagcctgcgccgccgctggcttgggcgcgggcttgggcttctcgagcgactctggagcttgagccggtgctttcggctggacctgagcagctgctggagcagctgctgaggttgccttggccttcttcttcttcttcttgctggatctggagctctgcccatcgtcggtcatcgttgacgaggaggtggtcgagctcgagctggcgccggaggcggctgccggcggcgggctcgagaacttccagaggacgtagccgaccgggatcaggaggagcgtcgggaggtagctcgcgagcgaggaggatgtcgtcgacgacatgccggctggtctcaagagggcaaggaggaattcgagtgatgagcgagatggcggtcgactgctggacgccgacccggctcgtcgaaaagggtcgtctccgcgcagcctcgacagccatcttcgacgtcgtcgccttcgctcctgactcgcgatggtgcttgccagcgctcgccggagcactctaacccgcaggccgtcgtcggtacagatccggcaggtcgcctcacagctctcgttcagcgcggcgcgagccaacatcgccgctcgcgaagacggcccggccggtgtccatgccttcagcttcctagccagcggtgcgtcgtcttcctgactccgatgggctggcaagagctgacgcgacgtacgggcctcagacgatgtcgtcttgccgagggcaggaccgctgaagggactcccgatagcggtcaaggatgcgttcagcgtccgcggctggcctatgactgcttgctccgacatcttggccggtgcatttctagctcagcctcctgctggcagtcaaggtcccgtctgacgtacgaacgcttctcagactttgtcgctccctatactgcgacaccggtcgtcctgctgcaggccgctggcgcccagctgatcggcaagacggcgcacgacgagttctcgatgggcgcgtcgtcgacgaacctgcctgcttccttcgcgtcaccgccagcgaacccttggtgtccgccaggagtcgcttgggaggaccgtgagctcaggtcgtgcggaggatcgagcggaggaagcgctggatctgtcgccgccggaatggcctgggcgtgagtggcgccgtcacgtccagccctcgagacgtcgccgtcctgacgctcagctacggacactgcagggctcttggcaccgacactggcggtagtacaaggctaccggccagctattgcggtatcgttggcttcaagccgacgtacggaatgatcagtcggtacgtcgctctccagttgctgcgccgggaggggtcctgatgcaggatgctcgccacagttggggcctcatcgcctatgccgacacactcgatacaatcggcatcatggcttcggacgttgagtccgtagagaaggtctacggtaaattctggcagtcgaggtggttagcagagcgctcgccgctgacgcactattcctcacccaacgcgcagacgtcgttgctcggccagatccaaaagaccccaccagcgtctcatcctctttgcgatcctcctcggcaaggcaagcgcacgactttctcgcaactctgccttcaacagactcgtcatctctcgctggcttgcggattggcatcccactcgaggccttcccttcacccttgacgccaacatccctcgcacccttccgggctctgctcgcgagcctccgcgcaagaggtgcaacccatcattcggtctcgacgccccttgcaccgcacgccctcagcgcctactacgtcatcgcctgcgccgaagcgagctcaaacctcgcgcgctttgacggcgtcaagtggggcacccgcggtgcgggtgaaagtgggacgttccaagacgtcgccaagagcacaagggcgctctttggcgaggaggttcgcaagcggatcctcgttggcgcctacagcttgtctgcagagtgagttggacaagggcgactgactgagcgaccagttgacaaagctaaacatctttctccctcactgctcgcagggcattcgactcgttctacctgccgtcgctcaagctgcgccgacttctgacagagtctacgctcgccctcttccgacacggctcgccgtttcatgcctcggccaagtcgccgtcagatcgcggggtcgacgtcctcttgagcccgacgaccacgacatctgccccgcctttggctgcgagcgccacagagggctacgctcaggacgtccttagcgtcggagccaacttaacgggctttccggcgctcagtgtgccgcttgggccgggccaggatggctggccggtcagcgtcactgtgacgggcgtctggggcgctgatgcagtcgtcctccgggtcgggaaggagattgagcgcgcggtcaggcatgccgatgccatgtgacccttgttgaagcagaagtcgagcagcgcacgtgtcgtgggcaagcgcatatgattgcacgcccgagggcaaagtcgtgcctcgaccagagagctcgcatgtggcgcagacatccgttgtgcccgctgcgtcgatcgagtgtgagcgacttggcgtgctgacggacacacagatgtctgcgctgctgaaccgcgggttgcgatcgtcgcgcagggctgctgcgaagcctgccgtcaagtgtcgcgcccgcagttggcggacgaagcagggttgtttcgccggccgaaggtactttcggctcgatggccccagttctgggctcgatgcgctagtcctcgccgctgtcgctgccgtagtcgccgagcatgccaccgaggccgagcacctccttgatcgccgccgcctttgcctcggcaagctcagcctcgccgtcggcagtgtctgccttcataccgccgacgacctcaagcagatcgagactctgctttttttcgtcgggctgaccgtcgccctcggcctctgcaggtcgcttgccccagacgcgctgcttgacgccagcggccgtctccggcatctcgaccgcgtcttcggcgacgaccttggcctttccgccggcaagggccgcgtcccattcagccaacggccacagctggaactttggccactcgatccaagcccgattgcggagcgcgttgataagcgtctgcgcgctctcagagaggaccggcgtcggcgggtagaaaacgggcgcagcctcgattgaggtcggatgcgggaggagcaggacggaaggccctgcctcgaccgacggctgaagacctgccagcgcaggcagcgtgtgcaggaggtcggtcggcgcgagcgagtgtacgagctttggcgctgacggcgaggcggctggcgcaacggacaccgttagttgaagggcgcgcgtcctgccgagacgagggtggggagtcagctgagcccgccttccttgcaacagcctgatgcacgcactttggattgaaccgcgtctggttctggcgcttggcttccatcccaggcggcagccagcgaacggcgccgaagccggccttcgtgagctcgttccgaagcacgcgctcgcggtcgcgcgccttctggccgcggccgtcgtcgccatggccagccttgacgccgtccgacttgcggccgaggtcctcgagaaaggtgtagtcggacatcaggctgccgtacgagtaggcgttcatcggcacgaacgccgctgggttgcggacgcccgagcagccggtcaccgtcttgtgggcctttgcgcacgggaccgagcacgtctgggtagtgcagccagggcaggtgtatcgtgcgacagccgcctcgcactggctgcaggtccgctcgcggtctgcgccgctcgtgccgctcgtcaaggcgatagggctggccatggttgcaggtcggaggggctcgctgcgggcgactctcgctcgaattcaaggtggagggagcttttcgatcgcacctctggcttcgcgtcgacgcgacctctgctgctccttgcctgtcgacgccgacgaccttcaagcccaccgagcgagccatgtcgcagagcgcactccgcttcaagtcgatcaagggctatgccctgacccaggtcatcggcggcggcggcttctcaaagtcggtcccaccgtcgcattcgcggatgactcgcagctggctgatctctcagcctcctctcctccccggctcttgcgtcccagggtctatctcgccttcaacccgacgacgcagctgacggcggcctgcaaggtcatctcgatcgcctcggccaacccggccgaaggcgacccgcctcggccgacgcgcaaagagctcgagaaggaggtcaaggtccaccgcatgctgaagcacggccacatcctcgaatttctcgacgccgttctcgtcgaggagcacacgggcttcgtcccgggcctgttcgtccttctcgagctggcggccggcggcgacctcttcgacaagattggtgcgtgattggaagcgcgacgagggccgggctcgagctgatgcgcttcgcccgtgcttcgcccgcctgatgcgcagcgcctgaccgcggcatctcggacgacctcgcgcacttcttcttcaatcagcttctatcgggcatcgtgcgttttcccttcacgttcgttctgcggatgggcttgctaacgacgagcctcggccttcacttgggtaggagttcatccattcgaaaggcatcgctcatcgggacctcaagcccgagaacctgctgctcgacgcccagggtatgtgcccacgtgtgctcgctcctacctacccatgctgagtctggggctgtctctccaggaaacatcaagatctcggactttggactgtgctcggttttcaagctgaacggcaaggagcgctcgctcagcggtcgctgcggctcgttgccgtacatcgcacccgaggtccgctggcgcctacacttcttctgcatgtaaaaggggactggatcggctgacgctcacctcgtcccaaatcctgtagctgaacgaagacggcaactatcgagccgagccggtcgacatctggggctgcggcgtcgtcctcttcaccctgctttgcggcagtgcggccttgctcccatctttcatccggaagaagccggccttcggactgataccttaccgcaatcgctacagacacgccatgggacgagccgaccgagcactctcccgagtttgtcgaatacgttcgcggcaacctttgggcgatggagccgtggacccggctgcagggcgacgtgcaaggtcagtgcccgatctggcctcgtaataaaaccccgcagaaggccactgacggactatctctcacagacctaatggcccggctgctgcatgtcgacccacgcgagcggattacgatgagcgaattgtggtcgcacccgtggtgcatccagaggtgcgcttcttgtcttcaccgacgagaacggtccggctccgcttttgctgaccctcttgatctcaaccttctcattgcaggccgagccaattcatgtcgcgacaagtcctggctcaacgtttgctcgaagggctcgcgtcccaaggcgagatggacatcgccgagccgccggtcccgcttgggttcgccctgtcgcagcagccgccatcgcaacggcccgctgagcagatggacgccgacatggagggcgacgacgaggatgacgacccgacggtgcggatgccgccgggctcgatggcgcaagacatggccttcacgcaaaacgtcggcatggtggtacgtttcgccttgcgggcgtcgacgagcaatcgatggcgctgacaatttgtactctgcacccgtcatttcagtcgcaatggtcaccggacggcacgcgatacctcgttccagagcttacgcggtgcttctcgctctcaccgccgtctcaactcctcccgatcctcttcgcgactgttagctcgctgccggcctcgcacccgatgctgctcccgctctcagcatctgacaccctgccagcgatggacgccgaagagtcagcttttgccggcatgcaggccactcagggggtccgttcgggcgagaagggcggccgcatcaagttccttctccgcgaccgacgacaccagctgctcgagggtgcgctcctcgttcggccggtgcgtgattcgcgaacagatgcggtcggctccctggttgtcatgaagcgtgcaaaggcgcgtcttcttctctctctgcgacaccggtcgtcgtgcgtacgcagactgcaagcatcttgctgatatcatacttctgttaatcatagggcgacccaatggagtggcgcaagctgtggtacgagatccgcgacagcccgcagatgcaggtgcgcgtgtacaagccggccgctggtccgcaatactagctgcggaagaaaacgaacgaggcgactcgaatcttgatttatgacgacccgaacgactcaacctgcgccgtctcacgcgagagcagggatcctctctgctctagagttcgtggccgccaattgaccagcctcgttcgccctcggctgggctgtcacgatcggtgccggcgctctgccggactcaggctcgcgcgcggagagtccgccgacgtcgactgacccctgcttgctgcccaccgcccgtctctcgctgacaatagccctggctggcccgggctgacatccctgtcgcctgccgcaggccgggctgctggacgcactggccatcgccctcgcgccggctcagctccggtcgcccaggcaggaggtcaccgcgctcccccgcctcgttcaatcaaccggcgaccggctcgacagctctggaccagacagcgtagcgggccagcagagacagcttcacctggcctgtgagactggtgtcgccacgttgaaggcgtcagcacgcgtcgctccggacggtcagtcgagggccggcccgagcggaggaggcgttctgcaaggcgaccaggcctctcgatcgcctcccccgctaactaagacacgacctcgcgagagtgacagatggcccgaagtctggaagggtgctcaccgtcccgaacgccgacgtcgagtcctcggacattttcatcccggcccaccaacgggcccgacctgcatcgggcccggcctgcatcacatcagaccgtcgtctctcgctcccggacgttcgaccaatcccgttgccggccgacggcctgtcgaagaatgtcggtcgagaccatgccccgagcgacaaacatggcctgtcatccggtgctcgagcagaggcactgcctataaaggtcagaggtcgagccggccctccttgctcttgcttcatcagctcatccccttcttccttgcagcctcctcgctcagctcctcggtcccggtccctcccccctcaccatgcgtgccgccctccttcttcccgctctctcccttgcctcggtcgccgtcgccgcgcccgccgcccctgcctcgcaggagcacgcgctcgacaagcgcacctggggtctcttgtgcgtcgtctgcctctcgcttccgctcgaccgcgaaccctctgttcttctgttgactcgctctcttcatcctggcctctcgcagctgcggctggctctacagctgcgacgacggctcggcctccgctgccgcttataccgcttcggttgcctcggtcgcctccgtctcgtccgtctcggtcaagtcggttgcctcggtcgcctcggtcgcgtgcgtggcaacttaagcgatcatctcttcttcttttgctcagcgcctgacctcctcctcttcccgctacttcagctccgtcagccgcacctcggtcgccgccgccgccgctacgcccaccaaggccgtcctcgtctccagcggctacgactggcagaactgggagggcgctctcggtggcaagtactgctcgtccgtctacacttaccagtcgtaccgctacacgtgcgagggccagaccttcaacgacctgttcgccgcgctctcgtactcgtgcaactcgcagcggaccctctgcaacgccgccgtcacctggacctggtggaactggtggggcttcgactacaacgactgcaccgaccagtacaaccagtgcatcggcaaggccaacgccgactgcgcggccaacaccgcctcgcaggcctcggtctcgcgggcttcgaccgcctcggtcgccctccagtcgcaggcggccgtctccaaggcctcggtcgcctcggtcgcttccaacgctgccgctgccgcctcgaatgctgtcgccgcctcgcaggcctcggtcgccttggtctccaaggcttcggccgcttccgtcgtttccaacgccgctgtcgcctctaacgccgctgccgctgccgctgcctcccaggcctcggtcgtctctgtcgcctcggttgcttcggtcgcctccaacgctgctgttgcctcgaacgctgccgtcgcttcgaacgccgctgccgcctcgaaggcttctgtcgcttcggtcgctgccgtcgcttccaacgccgccgctgcctccaacgccgccgccgcctccaacgccgccgccgcctccaacgccgccgccgcttccaacgctgctgctgccgcctctcaggcctcggtcgcctcggtctcgcaggcgtccatcgcctcggtctccaagacgtcggccgccgccgccgccggcccctccgctgctggcatcgtctccggccccgtcacctcgggctgggttctcgcctcgacctcgctcatctccgacctcgtccagtccggcacccgcgtcctgaccggctcgcagggctcggacgagacccgcatgtcggccgccttctgtaccaacgagtgcgcaacccgcggctttgccctcgccggcctcgagaacggctccgagtgtgcgtccttcttcctgctctctccctctatcgttgccagattgctgactctgctcctctcgtcgcctcctcaggcttctgcggcaactcgctcgtcaacggcggctcgctcagcacgacgacgaccaacgcgcccaagctctgccccaacagccagaccctcacctgcggcggcgctgccggcctccagctctaccgcaactcggccgtccttgacgccgccctgaacatcatccccggctcgggctcgcctgctcctgcttccacgacctcggtctcggccgctgctccggttgcttctggcggcgcctcctcctcgaccggcggcggcttcgtcaacggcgcctgcatcgccgaaattgaccagcggctgctcaagggccccaagttcacctcgacccagatgacccccggcgcctgctcgtcctactgcgccaatctcggatacatctacgccggcgtcgagtacggatctggtgcgtctgcgttctgctccgcttcgagcgaccctgctcagcagctgaccctccctcttcttctcctgcagagtgctactgcgacaacgtcatctcggtttccaacccttcgaaccagtgcaacatgggtcagtccttgctcgccttgctcgccttgtctttgtcgacgaggcgctcctgactgaccgctgcctcctccttcgcagcctgctcgggcgacgcttccaagacgtgcggcggacctcaggctctcaacatctacaaggcaacggccgccgaccagacctcgtcgacgctcaccaacggctggaaggaagagcggctctgcctcctcgacaaccagaacggccggcttttcaacggccctacgacctcgagccagacgatgacccagggcgtctgcagcgacttctgcggcaatcagggcctcgacattgccggcgtcgagtatggaacgggtacgtctactgttctgctcttcccccctcccccctccacccctcagtgctgacctgctcctcacctccttcagagtgcttctgcgccagctcgtcgaccgtcaacattgctaccgccgcaaagtccacccagtgcgacatgccttgcgcgggccagcagctccagcagtgtggtggcagcaatgccctctgggtcctcaccctcaccaggtagaggcgtctccttctagtttttctcttccttgactctccctcggtctcctccctgctgcctctctttctccctgcacttcttatttcagccttttgcttgcttgccgcctcgcggctctgcttcactctcttgcaccgcttcgcactacaccctgctgcctgtgccatctcatgcccctcacgaaccgacctccttcatgcttgctgcgaacgggcgacctcctcaatcccggggttaagctggccacccactgtaggctctcgaggccgggacgacatggctgcacgtctgcatcagtgaagccccttggatctcaggttgcgaacgggctggagtctgctcaagtggagctcctggcggcacagacggcactcctcctgcaacgaggttgagatagcggagagcggatgagtgcgtcaaggcagcaatgcgcgcagccgaaatcgctcaggtccccttgcctgagctacctgagtagcctgagcagctgcgggcgtacgagtcggcagggcgagatacgagttggcaggcaggtatcagtgcgcggcagggctcgagctgttcctccggcgacagagactgaagaggcaggacagagacttgcggacgagaaggatggaagcagaggcagaggaaacggggttgtcatcgatcggacaagccggggtgggccgctcagagcacgagagacggccgggcccggcccttgggccgacgacagagcgtggaggtggaggagagcccgagtataggaaggaggacggaaggaagcttggtttacacgccagagcgcgtttagccggagccaccagagtagaccttgcctagagggaggaggagggcggacggtcagcgtgccggtcgacggtcaggaggcgcgatgggtgataaaggagaaaacgcaccgaacataagctcctgcatcttgtcgtagagcgacaggacaccggcaccggcaacaccacggaggatgttggcaccggcacccttgaagagcgacttgacgccctcggcggcgacaatctggcgaccggcgtccatcatcgacgagtagtggacggccgagcccgaggtcatcatcatgcgacggcgaatcgtgtcaagcgggtacgaggcaaggccggcaccggtcgtgacggcccagccgagcgcgaacgaggcagcgaagttaccctcaagcgggccgacaaggacgacgggcttgatcgagtcgtagagaccgaagtagagaccacggtagacaatgatgccaacaaccgaggggaggaaaccacggtagagaccggcaataccgtccgaggcgagcgtcttcttgtagacgtcgacgaggccgttgaactggcgcgagccaccggtcttggtcgacttgttgtcgttggcgagacgggtacgggcgtagtcgagcgagtagacgaagaggagcgacgaggctccagcggctccaccggaagcgatgtttccagcaaaccacttccagtagccctcgttcttcttgaagccgaacagggacttgaagtagtccttgaaggcgaagttaagagcctgtagaagagagcggggagcaggtggtcagtgagggtgctcggatgggaagtctcgcagacgggtcggacggacctgggtggggaagtaacggataacgttggcggtgtttccacgccagaaggcggtgagtccctcgtcggcgtaggtgcgcttgaagcagtcaccgatgccgttgtagggggtggcgaggcggccctgcttgatcctggaaggcgagaaaagcagatgtgaatgggcggctgtcgagatcagactcagaaagaggcaaaaaaaaaactcacatctcaccctggttctggacaagaagcttgatgcgctcgatgggggcggcagccgtcttggagacggcctgcagagggaaaaaggcagaggcagattgggtcagttctctggtcaacatgtgtaaaagaggaagcaagggaggacgcacggcggaaacgccaccttacgagagagaaaggatagcgagagataaggtcagtcgacggcccagagcatgtaccggtgaaggccgagtctcacccatgaggaagtcggctgaggaaggaagagcgagcagtcagcgcgagctcgatcgagacagacggcatacagcagagcgagacgcactagcgaactccgcgggggtcttggacttcttaacggcggccatcttgttctttctgagaatggaggtaggccgatcggagggaaggtcagcctcaagccaacagaaaagaggagccgaagtggcgccaaaccagcctggtaacaaaaaaaaaacgcacctgtgtcggtgaaagatcgcccagagagagcagtgcagcaggggagcgttcgatgtcgttggatcggtaaagaggcgagaggcacggcgagcggcagggcaccggtcgagatgtgagaaaacaaccggtcgggcaggcaagaagggacggaaaaggcgcgggaaaagcgtcagtgggctgtcgacgaccaagcgctccgaccgagcatcggaacagtggccgacgtgccttcaggacaagggactgacggggagagagagggtgctgagggtcaaaggccagttgcgccggccggcgcgccataggaaaaccgcgggcggagcggagcggcacggcggtcagacgggaatccgccggactgcccgtttcgaggcggccccggccggccccgcgctctggcccctggtcgtgcctgccggtccgacctgtgaagcatgctggccgggcagcataggtcgtcgcgggtgaaagcgtggactctgcatgcgagcgcagacgaggaccaggtcgagctgccaggaatccctagtcaagacgaggcaccggcaaggcaccctgactgacggccacgccgatcgggctgatctccgtgttggcccgacgaggcggcgcagagcgagagccggcggcgagcataatcttgcagaacctctcatccagccaaccagagcgatccttcttcatcaaggggtcatgatctcgtaacgtgcagcaggcgggcgaagggggagggacaaaggacagaggggctcggcccggcgacggaagggacagagtctcagcggtagccgttgaacgacggcggcgggccgacattgtcacggtaggtcggcgccggccggaggtcggggttgacatgggacaggtcgccctgggccgtcccgccggggatggtgaccgccggccggtaggcctggtcgtagtagcgcggctcgtagtggcccgagccaccgctgccgttgacggtctggccgccgggcgccggcatgctgtcgtaaccgtacgccgagcccggacgtgacgaggttgacgacgacctcgcgggcggcacgaaggaccgatagggctgggcagcctctgaggagccgcctgggagggatggtcaccagtcgtcagcatctgctgctcgtaaagaattgtacgagacgggaccgacctccgttaatctgatcgtagcgtgggcgcttgtcgatctcggagctcgcctcctcggtcgccgagcgcttgatggcagaggtaccggcactcgggaccgtcagagtgtcgccgctcgagggccggcgcggcggcggtggccggactggcggctcgtcctcatccgagctaaaggtgaggtcgatcggctcgtccgacgtgccgaccggcacgggcgtctcgtcccgcgccgatgacggcgctttcggcggctgagggaagcgggcagcaagcgggacgtcgctcccttcatcatcactgtcgagaacaaagacctcgacgtcctccgccttgcctttgcccttggtgtcgttcaccggcgacgagcgcagcgaaacggaggccgaggccggccgcgaagccgcgtgcgcctggagccagatcgggtcgccgtatttcttgtcggccgtgtgccactgcgcgttgggctcgacgacgacctcgtcgacgctcgaggggaccgtcttgaggatcgagccggtgaagctgcaaacgcaagggagggctgacggtcagcttctgagtggcgcaagttgagctacagaggaaggcgacgcactcgtcgatgaagaggtgctcaatcttaagcccttgctcgcagatcgggcacgtccatgtcggcgtctgctcgttgatctgaaaccagctcgccgcgtcgaagcactggatgtggttgcagcgcgtcgagcgcatcgggttgctcatccggatgtacgatagctgataaaggcaggcgcgaggacagacaaatcagaaaagccagctggacgacaaggcggaaaaggaggacgcacggggcacttgaggccgacggtgagcgcgccgacggtgatgtcgtcctcgtcttcgtctggcggcgccgtcactagcagaagagagtgacgaggcgtcagcgaaggctcggtagcgagagtcgggtcgagctatccacgcacgctctcgaacgacctcggctgccgtccgatgcttcgacccctggacctttttgacgaggtcgtctggcgacagagacttggtcaagcagatctgaaagtagtaggcgagctgcaagagcgaggaaagggatcgtcagcagattgagggctcacaaggccgggttcagcccaacggaccttcggcccggccgtattctggctctggttgatgtggatgagctcgaccgagctgcggccagacgggttgaggtctatcatgcgctcgccgtgaatctttgccttgtgcaggttggccggcggacagcttccgatcttcttcttgacgcccttgagcgaggctgcgatcaggtagttattgacgcggatctcggacgtcggcgggaactcgactggcaggccctcggtcgcgcccgagccgagcggcccttgtgtaggggtgtagtaggtcgagggcgtgcagtacaggcggagagaatactgcggcgacttttgagggtttgccctgcgcaggagtcgcgtgactgttgtcaatagtcgatcacgaagctaagggggccttcgcagactgacagtgaatcgagaatcttgacccggaagtcgtcgttgagcatgacgtgcgtcgttgctgacttgcgatcggccgcacccatcgaagctggacgagcggagcgcaaggcaggtttgagtcaaggcacgaggctcggcctaagcggcacacgatgtcctactcaccgggtaccaggatcatcgacgagattggctcgacgaccgacaccatgggcgactcgcgccagcgggtagctagcgaaatgagcgaggaggatagtctcccgacgtcagcgcgagtcaatggccaagcccgtcgagacgcgagcggaggcactgacgccggggcggaggagcgaagtcgtgcgcgcttgaaccgacagcgcggttgtcccagctattgagggcggccgccgatgcagagctgtagcgcggaggaacaacagctgcggcactcgacactggcggccggtagggcgcagcgggcggcggcgcagcctggtagccatcgcggtacctcgacttggtgccggcaatctcggctgcgggtgcgaagacggccaaaggtgagaaaaaagagtgaatcagcgtacattcgctttgagcgccggtcgtcgtggtggaggatctcacccttctgatgattgtaaaggcggccgaacgtcccgtagctcaccatgtcgttgttcttcttccaaaagtcgagctgcgacgtgatcctgagcagtccaaaaaggacgagggccagtcagtcacgcataatcatggcagtggccttctgatcgatcagccggcccgatctctttagagggcaggcaggggcgtcgcgagaggcagcccgtccaccgcagggccgccacacgcgaccaacgcttcccttcgaagccgctatgctgaggatgaacgtaccggagaatgatgtcggcctttttggcttgtgaggtgcgaatgctgaggcccatctgggtgttgagcatccggatgaactcgttgagctgctggatcgtgaagaggttgagcttgccatggtagagctgagggcgtggtcagacagaggagagaggcagatgaagaggctccgtcagcgctacggctcgggctgagtgccgggatgaaatcaggacgaccggcatcgggccccggccggctcgtcaagtgcagcaaggtgctggacgtacgctcaggtcgtagaagacgttgtaggaggacgacgacgccatgctgggctgctgctgttcaggagtggcggttctcaggccgtcgaggtggagctggccgagagctgagccctgtcgcccggccagaagcaatagagaaggaggacaggaggtggcggtcgagcggttggagtcgggctggcggtcgagaaggggaggagaggggagagggcacggcggcgggacggggatgcgcgagggcaggtcgcacgcgtccttcgtgtgccgaagcacgcggcctccttcaaaacctcgtcctgccctttctccctcagcaaaagagctcctagtctgctggtgcttgtcgaaggggtgtctgtccttcagccgagcatttaatcgcgcatccgggccggcacaaaccggcggaggacgagctcccggacgttatactgcgcccacgactcggcctcgccgccgcagaaccagttgtcgcgaccgtcgagcgaaaggggcgggatcgtgacgtaggtcagaacgagagtctggggcgataggagtggcagggacgcgtcagcacgttgcagcagcctcctggagcagacggacgaagccgcaccttcttgacctgcgagttgacgcggttgatcgtgctcagccacgcccagtcgatcggcccagagttctccagctcgtacggcgacgatgcctgatcggccggattgctgtagaccggaatgatgacgatggcaaacctgcagatggaggtggcgttcagcaaggtgtcaaagagcgagctagagaatgacagacgcactcggcgtgcgagaagacgacgccgcgtttgtagagcagccagtcgacgcagaatttgactcccggtcggacgacccagccgagcgagcggtagtgatgatagaccgcatacgaaatcagcaacgggttgtcgggccgcggcgccgggtcggccgcagtcgcgggcagcgaggcaaagaatgtcgaccggcgatgaagcagtgcgaagagagccttcaacgacaaaggttccgactgtgaccgcggtggatcgaggttagcaccgcgtcgctggaggatgaaagagcaggaggcagccgtacctcgttcggcaggtagactctcaggcagccgagcgcccacgccaggaaccagatctcctccggcagcacttgcagatgctcaaggttgacaatttcgtcctccctgatctcaccctcgttctggcgcgccttacccttggtgtcgggcggcggcgcgacgagcatgccgttcgccggccgcttcggccgcgcaatctccagctcctcgagcgtcagtccactcggatcctcctcgacgacggcaccctctgctgcggccgtcttagcaagaaactcgcgctcggccgcctcgacggtcgcgaccgcatgcaacgcccgggcgatcttgaactgtttgcgctcctgcctccgcagcgccgtgacctcttctggactgagcgctgcgggcgagacggggatccggggcatcacgtcagtcgagctcgacgagccgaagcctctgagaaggtcaggacgcactgttggactcgttcgacagctctgctatccgccgcttcaggtacgtcggctcgctccggctcaggctgcccttgccgaaattacccctcgtccagagcgcgagcacactggccgggtcggtcacccagacactgcccgtcagctcgtcccagacgcccacaacgtcgggcttgaagccaatcgccgcagacttgagggccacggccgccgaagaggtctgggccggttcattggccgtcgggacaagcgtcggtagggggaagcggtacgtctggttgagcagagtgcggtgggcactcgcactcccgccgcgaccgcccttgaaaccgccgcgctgaggcctgctgtccgaggaaggaggcgccatgactgtttcgatctgctggctagctaagactggagaagaagaggaaggcgaggaggtcgggtgaaggctcgaggtcaggaggctcgtcgctttggccgacgcgtttcgccgtcaacgacgatcttctcgacagccccttgcagcgacgcctctctccctctcgactctccaaagctcgcgctgctctggtgatggcgcccaagtcgacgccacgcaaggcgtccgcgtcgtcgtcgtccaaggcggtcaggaagcccgacggcggaccgcttaacttctacgtctgtcccttcttgagctcgtgcctcggccgtcgttcagcacccacgtcagagctctgacgtgtgcccctgtctgctgctgcatcccaccatcgcctcttccagaacgggccgaccgaggtcgcgtccaaaaagactcggtcaagcgtgtccgacacgccgctcgtacgtctctttccgtcctggatctgaggtcatggaaggccgcgctgttcgagcaacaagggggtctcacacgaccgtgctcgacgcctccgacaacagaccatcagcgtgcggaaatcaacccaaccgcggcgatcaggcctgaggcagctgctcctccgtgccgtgctcgcctttgcgttcctttcgctcgtcttttgcccgccgcaggtgacgtcgtcaacgcctgccatctgccggccagcgagctcctaccatgcgacactgcagccctacatccagccgcacatcaactcggtcaaggcggcgacccaggcgcgcctcgggccgtactacgagccgtatcggccgcaggtcgaggctgtcggcgcgaggatagcctcggctgggcggaagggactcggcgtcgctgccccgtacgtcgtcctcggccggtcggctgtcgtcaagaactacaagcggcacctcgcccctcgagttcactatgcgaccctgcgtctctcggcgcttgcgcagccgcacattgacaacgttatgctccgctaccgagtgctcattcggccgtatattgttcgcgctcaggccgcgctcgcgcagtactcggcggcacttgtcaaccaccgcctgacggcccagatcaagactcgcgcccttgctgccggccgcaccgtgctggccagcacctcgtcggcctaccgcagagcccacccggaggtcctgcggttgtctgcgatcgcatcgaagcacgccaccaagctcgtcgagcacgcccagaagcactcgaccgtcgctgccgcggccggtgctcgcttcgctcaggagaaggcgctcccttttgctcgcaagagctatctttccggcaaggacctgggctacaccggcggcaagaggctcgctctgtgagtcactcgcgcatcacttgccgaacctgcgctcccgagactgacacctttgcggtcgactccggccccacctgttgtagcgaggtcacgacgctgaaccacaaggtcatccagccccagctccgccgggctggtgcggccttcaacaacaagctctacgagccctacctcgccgagcaccttgagccgctcttccagccggcaaagctgatcgccaagacgacggctcgccaggcggttcagctcggccggcccgtcatccactacacggcgctcgcgctcgagctcacggcccgctacacgatgctcgtctacaatcaggtcgtctcgcccgccgtgtcgcgcacggcgacgtcctttgaccggcaggtctacacaccgtacctggctcagcacctcgacccagtcgtcggtccggtacaggctggccttgtcggcctggctctccacggccgcaacgttgcaacgcccgttttcggcgaggcgcggaagcttgcgcttcccgtctggcatcactactttccagcgccaaaggagccgacgctcgtcgataagctgaccggctcggtcgcggccgcggccgataaggtcgagagcctcttcgtcgccgagcaagaggttgaggctcagccgacgatcgtcgagcaatttcaaaaggcggccgaagctgccgtccaaaaggttgaagaggccttcgttactatcgccgacgagcaggttgccgaggataagcctgccgagtgtgtcgaggagatcgaggaggccgagccgaccttcgaggtcgagtcgatggaccaagaggtcgttgacgacctcaccggcgaggtcgaggacgtctcgatcgaggacgaggagactgttgagaccgctctcaacgacgcccatccgacacccgccccggtcgtcccaggcgacatcaacgccgagagcgagtcgactgagcagctcgcggtggaagaggagctggccttcaccgacgatgacgtctcgacggacgagtctgatgaggacgaggacgatgaggacgcagcgttcctcgcctcgctcgaagcctcggacgacccgattgctgtcgaggtgcccgagatccacgagcctgagctccctgagctgcccgacgtcgacgacacctcggccgaactcgccgagaaggctgccctaaagaaggaggcggtcagcgagatgcgccaagagatcgagaagaagcagcacgacttcgaggagaaggtccgccgcgtcggagagctcgaggagcagaagcttgtcgccgaggtccgtcgcccgctctccttctcgtcgcgactgcgtgcgaactgacctgttgcgtctggccctcagctcgttgacattcgcactcgcgctgtctcgtcctttcctcgcctggccgagcactggctgtcgaccgtcgagaaggatgcgaacaaggctgcccgcagcctcgaaaagtacttccgccggtcgaacctcaagtgggacgatatcgagtccgccgtcctgaagggccgctcgcgggtcggtggcaaggtcgatgacgcgtccgagggcgtcaacgcttggctagccgaggttgagggtcgtgaggagcaggctgtgaccaaggctggcgacaaggtcgacgcggtcgccgccgaggccgtcaatgtcctcggactggcttgtgcgtgctcgcttgtcttgggcctcgaagctggctccggctgacatgaggtcccccgccaacagacgcctggctcgacgacgtcacccgccacgactgggcgcgctaccacggcatcacaaagggttcgcttgaagtcgctctacttgagcccataccccaaccatgtctgccaaactgaccgccgcgcctctccttgtcgcagccgccgccgactggcacgaccgctttgccgagcagacctcgcccgagacctccaacgctgagctcactgcgcctgcgaccgacgtcgacggcctgctcgaggccttccgcgaggagctcgaccagatccaagagggcttcgcggccaagatcggtatcgccaagacgaacgcgatgctcaagctcgaccgcgagaagcgcaaggctcagggcttgcccgaggaggacgccgagtcaccgctcgtctcgatccagccaatctggaacgccatcggcggcggtgcggcagcggcggcggctggcgccggcgtcatcggcaagggcaaggaccagatcattgacgctcttgcgcaagcgagcgcggccgccgtcgggacggccgaggcgagcgagaccgagaccgagacgggcttcctcgcgcaggcgaccgagcaggcggccgccttggttgaggccgcttcagaagcggtcctcggcgtgacgaccgtaaccaagactggcttcgtcgagcaggcgacgcatgcggtcgaggtcgcctatgacgaggtggccgctcaggctgcctcgctcagcgacgaagcctcctcgctcctccattcggcgacgcgagcggccgccgtcgccgtcggtgcgcggctgacgcccgagacgccggccgagcacgtcgagtcgctcctcaccgccgtctcggacagcgcggcgtcgctcgtcgaggcggcatcggagggtctgcacgaggcgacgcgggcggcctcgcgcgcggtcggcgcaaccccgacgccggagacggtcggcgagacgctcgctctggcggtcgaggacgtcaagagctttgcagaggagggcgccgagcgcgtccaggaggcgcttcatccctgaagtggaggaggatctggtgccggtcggttgccggcgacgatggggggaaaagacggccggcgtagtgtcctcgtacatctctgccggctcggacgatggcaccgacgggaccatcctatatacgcatgcgagctaatacagacaagaagcgtgaccgggcaaagcgctcggccacagttacaagaaagacagtcggaggagagtgacagtggacaagggccatcttccgccgctagcgctgcggtgccggccggcccgtcggaggctcgtgctgcgcgaaacgttgcatgtcggctaaggggacagtcttgagcgcatcgatctgtggacacaccaccgacagagtcaacggtaggtctgacaggctccggagtgaggctcggacgtacgtgcgtcgcgccaaggaccaccttgggcacgatatcgtcgccgaactcgcctcgagccatgaaagcctccttccagcgctgcagacgagatgagaggatacatccctagtcagtttctccatcaacgagcgacatcggacgagcgcgaccgggcgagaagctgtgatgcgcacctcgacgcagaggcaccagcggcagccgtccttgaggcccgggaagccgtacgccggcctgggtgtggaaaggtcgttgcctcgcgacttgctgaaatcgaggaaggccggtgtcaggacagcggcgagcgtgtgcttgccgccgtcccccgggtgggatcggcaatagccgtcacgtgtgtagcctgggtggggtggtgtgcagctcagccagagtaccctcttccagctcagagggaggcggtcgtcgagacccagatgacgacgctggacgagcgaccacggccccaatcggcaattcgacgtacctgtcacggggtcctgcggccggaccgaagccttctcgagcggccggtggaggacgttgagatcgccgactgattcagacatgactgcgaagtggcgcttgaagatgcgcttcagggccatgtggttggcctgtcgatcgtgagaagtcattcaggtggtcagctcgtgctgataggttttgacgccgctagccaagatataccttcgaggggatggttgaagagggagatgacggtcggcagcagctcggcggggcgcaatcaggcgacgaggcagggccgggcgcagcagcccctcctgcgagctcagggagagactcgacagcaggcctcagctcttgagagctgcctgtctaggccgaccgaaggagggagcagcagctgcatgtcccagtcagccctcatgagctgcctctcgccactctttgtcctggctgaaatgtttggtccttgctcgctcggccccggcgagaggagacgagccgacgcgcctcgcaagatgctcctcccctccgaccgccaagccagcctacaatgtccgcgacgtctgacgagcaagacaacgcatccgaacgcgacgacggccgcatcttgccgccttccgtcgcgctggccagctgggcgacagccgtccgagccaaggccgactggcagcgcaagatcctcgacgacgaccgcggcctgtgcgccaagtggctcgccgaaggcaatctcggccgcttcgacatcgagccagcagtcatcgagagcctgatgcggtacgtctggctacactgttgccgtaccgctgtcgatttgtgcgagaatcgacccgctgcgcctctgatctcgacagcgagctcaaggcagaggcaacccgagcgcttgcctttgatcaactgtcgttcgtcgcctcgggtggccgcatcgatcacgaagcagccgacacgccgctcccggcttccgaggccgatcagatcaaggccgacgtccgcaaggctctcggccgggcagccgagctcatcgagacgccgactctgcgtgataaccttggcgtccgaacggccgacgggctcatccccaagagcctgcacacgctcgtgagtcccctcttcggcctccctttcgactgagaagttgaccatcagatatccattccagctcgtctcggagctcgatatgctccagcagcagtcaccggttcaggactttcacccgggctcagatggcaaggtgctcgacattatccatccctcgctctgttcgtcctcgattgagggcagtcgcacatacccctggcgctgactgcaagcgagcccacacagacccttttgtcgccggtcaaacgcgcctcgtgtctggtgacggcccgcctggcgacctcttcgagactcagactgagctgcagctgcacgacgagtacgaggaattggagagcaccgtcccccacaagaggtgcgtcagcagagacggctctcgcccggacacagactgattgacttgactctgacacgaccagtcgatttgcttggctaccctcggtctttcgaatctctgatgccggcgaggcgaccatcgtcggctacatcaatggcctgggaccgcgctcggcccacccggctctctacgctgccgtcgagaacgtcttcaccctcgccctgccgcttattgagcagagcctgaacgcgccctttcaacgtgttttcacagaaagctaccagcgctggcaggagcgtcgggccttcctgacccgcccgggccggtacggcgaggacggcctcacgcgtcagcagtgggccgacttccaggctgagcagcggcgcaagcaggccgagggcttctactcgcgccagctcgacgaaaaccagcccgagtgggaggcgaagctgcgcgggccgatcgacgtcaagggccgggacctcaaagttatcgtgaaggcgaggctgctcggagcaacaggcgcgacgtgtccgtttgctgacccctgtcgaactgtgttcagtgcaggtcgccgagtatcacctcaagctcggtcagacctacgagggttcgtggcacatcgaaggggcggtgcgtggctacgagtcgcacagaagcgactctcgtcgtcgctgaaccttgcgtctccatcagccgcacgagatgatcggctcgtccctgatctactactacgagacgtcgcccgacatcaaggacaagggtctcaacctccgtcgcgtccggattgagggcgacaagcccgacacggcagacgagcacggttccgtgcggccctgcctcctctccagcttgcagacgttacgatgctgactagctgacaccgctcaaatctgtcaactcaggaggactatggcgtctacttcggatctgacgaagacggcgactcggatgatgaaacgtgcagccagtacgttgccctcgtctgactttcgctcggcaggtgtgggataggctgacccccgtcctgccgttgcaggaacgtgccaagcgactggggctcagactttgacccttactcgtttggcggcgcggtcccgctggggacggtcggcacgacgggaggtccagacgtgagcgagacgggccgcttgcttgcgttcagcaattgggtccagcaccaggttgccggccttgagaatactgcggccgtcgatgggagctcaacagcgccgggcaaggtggccaagcgcaagatcgtaagctctccggtcccttttcctgccctccctgccggcgattttgagaggctgaccttctccgctctcttgtcgcagctctgcttcttcgtcgtacgcgaagatcgcgacatcggtaacgacgatcagctcacgctgcccggcctgacgtgcgtccaagctttttaaggagggaaagcttcgcactgacagactgcatttacctgcagatacactggcctcaagtcgatcccgccagtcatcacgaccctccaagtccctcctcagcagcaccaccttgccttcccgccgactgcctactggctcgcacgggcatgcgagacgctcaccggcacggccctcccgaccgagctctgccaccagatcttcctcgagtctggcacgggcctgacgagggccgaggccgagcgcgtccgccgcgaggttatggaggaccggggcaagcttacgatggaggagggcgagttctgggagctggccgatttcggcctttgcgagcattgatagagggcggctggaccatctcccatcattttccttcattcttcctgggcttatggtcgatttattatcgcttctcttctatctgcacgtcccttgggtccagctagaatgcgacgtcttgatacgggtatagtcaagcgagagagcgcgggtgagccgcggtgagagcgcacggaccaacctagtcatcgtcgaccggccgaccgaaagggacgcacgcgacggcgtcgggcctgtacttgatggcgccggcgagcgcttttgtgagcgccagccttttaggcagcgacgcagtcggccgttacggcgagttcgatgtgaacggcggtggacgacatgctgaaatgggcggccgtgcagaggatgagggtgggaaagagcgctcggctcgggacggcccctggtttcacgtgcgcctctcgctcgacgtcggtcgtcccgtccgcaggccagccagaactcgtccaagccgcctcaactctcctgggacgcgagcggacagtcgataacgagaatgaagacagagaggggtgtggagagacggtcgcgacagttgcaagaggaagtccctaggacggacggagacatgcgcagacgagagcgtgttcgacagagaaagggaggaagggttgcaggggaggcggaaggaaggggggggcgagattgacttcgttttgagaaagaaaagcaagggggagagggaggtgtttttatgagggtgacggggcggccggcggggaggtcgaccggcgcgccgatcctacggacggacagggagcttcgagagccggcccccggcctggcgagtgtccgtgctgggcgtcaagcctttgtgatttaggcaagcgacgggaaggccgactcgtcggcaaggttgacggcggcagccttctccttgcgggcgacgggggcggcacggggcgcaccaccccggaaggcaccgccgcgggcgccacgggcaccgccacggccaccacggccgccctcggcaccaccacggccgccgcgagcggcaggggcccgggcgggcttgtcctcggaggcgaacttgccgtcgatctcgatctgaacagggagaaaaccaaaggacaaacgagacgtcagcggaggacgcaaagctttgacaagaaaaagagcgcacggtgttcttctccttgcgggccttgagggcgcgctccttcttctccttggcggcaaagaacgcgtcctcgccctccttcttgacaacctcgccctcgccggtccactcctcgacgacgcgcttggtgagcgaggcgacgccctcgatcgcggccgaggccttggcagcgaggtactcggcgtacgactgcgtgttgtcctcctcctcctcctcctcggtccgcttgggccgggcagtctcctccttcttctccttggcctcgccctcggcgggcgtggcgacgcccgaggcggcggcggccttagcgtcggcttcagcgtcggcagcgccggcaacctcgtcggcgagctcggcgtcgccggtcacgtggccggagccgttctcaatcttcttctgcgagtcgctgtcgagtcgcgagtagttaaatcgtcagatttcgtcgcatctcgtgagcgacggacggcagagacgtacacgtgaccgcccgacttgcggtcgaagccaccgtgcgaggcagcgccggcagggacgcggcgagcggcaccaccacggccgccacgggcgcccgagggctggctgcggcgctctgagaggaaacagggaagccaagtcagtgtcagacgctttcttcagaagaatgtctgccccctgccaccaagcgcggctcggacgcaagggcaagcccttgctgcccggaccgtgcgggacgctctcgcaatacgataggaagaagaatgaagaccggccaaacggaacgcactgtcaaagacctcgccgacggacgctccgggctcctcgccgcggggagcgcggggagcgcgctcgccgcgctgctgctgtgacttggccgggcgggcagcctccttcttggcaggggcagcggcggcaggggcggcaaccttgggcgccggggcagcggccttgggggcagccttcggggtcgggatcgctccgttgcccgagtcgtcctctgcgagcaaacgagggaaggaggtcggagatgaggcgtcaggaagtaagctgcgaggaaggacgacctggagcacgcggtcaggaagagaccagccaacaggctcccggcatttcgctcggctgaggcaagggcggccgagtgagggcgtccgagaacgacgacgggacgacgtcgtcgggtgcctggcctggctcgccctggcgaggctcgcttgccttcccgagcggacagagcgacgctcgttgcgagagtgcgacacgtccgtaccggcgtcgtgcctagcctaagctcccgtagccggcaagggctgggcaacgggcgagatgcggacggcctttgtcaccagggcaagagctcgaggcgaggtttcgaagcccgccctcgagctgccgagaggcgctcttccctcccatcgacccagagtctcgggtactgacctccgaggagctcgaacaggttctgggaccggacggcgctggacatgctgtgtcgggtgtgttggggtaggtgtgtaagggcgggaagaagggcggtaggctggatgctggttggccggcctgcgagacttttcgcggcaggcggggcgcacgaccagcgtagcgagcgcgcaggcccccgccagccgccggttcagactccgccgcctcgaccgggccctgccctgcgccacgcccggccttctcgatcagccagtacttctgacgccaagacggccaggacgcaggctgaccagttctgatgccgcttgtgtggctcgctacaaagtgcagagctcgccacggatgtcgccgcgtgagagaagcagcctgcagccgtagcgcagtcgaacgatagcgcaatcaaagccatgctctcttctcgcatcatccggaccgactgctcctgctgctttgattgaaggaaggtgtcgctcttggcgccatcgcacctcctacccgcgctctcttgctcttcgggtactcgcggccggagtttagtctgcgcgcgcgcgcgtcagcgtcagcccgccgggcagcagcgacggcgacgacgacccgacgacgacagcgaccctccagcgctctctcgccgcgcgctcatcccttcctctcctctggccgaccctccgatgggcagtccgccgctcggcgacggagaccaccacctctcggccctcgagctctcgcacgcgcgcgcaaaggccaacaagaacagctgggactatggtcggtcgacccgcgccacgctcgctcgccgctcaagagagagctgcttcctgaagctgacctcctcacggcccggctttcctcgcgcgtacagcgatccggagcggcgtcgcgggtggtgtcgctggctgcgtcgtatgtcccagcttgcaagcaaggagcgacccgaacgccgacccgagctgactctcgcgcggcatgtgctccacctcccttcgaccgttcaggccaagactgcgatagcgccgctcgaccgggtcaagatcctcttccagacgtccaataaggacttcatcaagtaccagggtgcgtcgccgccttccactcacgacgagccaatcgggacgctgacgagctcgccttgcgacgcgcccgctcgcgaccgaatggcggcaggctctttccgcgggctgtacctctcgatcctcgacatttatgccagcgccggcgcccgcggcttgctccagggccacctcgcgaccctcctccgcgtctttccctatgccggcatcaagttcatgctctatgatcgcgtccaccacgtccgtccttccgaaccttcccgacctcgggcgcgcgcgcgcagtccttctcctcaaactgacccgagctcggcggttctcctttctctcaccagttcctcatgccgaccaaagcgcaggagacaagtgcccgcctctttgctgccggctcagtctcaggtccgtcaggctgccgtcaacccggcgcatctgagcgcgcgctgaccccctccttctcgccttctcgcgcaggcatcgccgccgtcttctgcacgtacccgctcgagcttatccgcgtccggatggcctaccagacgcgggccaacgagcgcgtctcgctcagccaggtcgtccggctcatctacaatgagattccggctccggccggccagcaggccgccgcttcgaacggcagcgcgtcgaaaccgccgacgccgccgccaatagcgggcagcgcgagtggctcgacgacgggcgctgctaccgccgagagtctgactggccgggcgttccgcttcttcccgcttgcgcccttctaccgcggcttcacggtgacggtcctcggcatcatcccctacgccggcatctcgttcctcacctacggcaacctaaaaacgcttttcgccgaagagacctaccggcgacaccgaacatccgtcgacctcgcctgcggcggcctcgcggggctcatggcccagtcggcgagctacccgttcgaggtcgtccggcggcggatgcaggtcggtggcgtcttccggccggcgggcctgcttacctggcgcgagacggtcaaggcgatctggaagcagggcggctggcgcgggttctatgtcggcctcggtatcggctggctcaaggtcatcccgatgaacaggtcagctctcggtgcgcgcccttgacctcgtgtcgagcattgctgacgctttaagtatgccccttccagtatctcgtttgccacctggcagtttatgaagcgaagtgcgtcctttcttgtcgtgtctcccccttccttgatgctttgctgaatatctgccgttcacagccatggacatctaaggccgtcgcctcggctcctgatcgtcaatctcgcccctcggacgcacgcctcccgcccttgcgaacctccctcttcaccagaccctggacgcctcccgcacacaagctcccacgcatgaccacctagatgcgctcgccccgtctcccctcgtcgttccgacaccgccctcattcgcgcctcctcaaacggccgccaacacacccctgcatgctgggcttccatcctcaccctggcctcctctgctcccttcctctcgaccgaccgacctaccaactcccgctctgtattctgcgccctcctgcactatgtaaagatgcatcctgctcggccttcttccagtgccacgtcctcgatcgcctcgacgagaaagcgtccgatggttcgcagcggcttcgacgacgacgacacgagccacgaccccgccttcgaccgcctcgacgctcaccccagtcgacttagaactgccaagtagagacgctcgccctgtccaagagtgcgtaaggctgccagcttgctactgagcgatggcacctgcgaccgtggtctgccagcttgatctattgctgctgaccttcacctcggccgacctcgctccgttgctctcgcagtggtcgccgacaccgcttactgtgcgtccctctgaaccggcgaaaagcttcacacgcaagctcataactgaccactatatcgcctcctctgcagatgacctcctcggcgtcgctgctgaggcaaccgacgccgagctcaagaaggcgtacaagctgaaggtaggtgagctgccgcagtcgcagctcatcagcgaagctcgtcatcccgggctgaccagcgctcatgccttctcgaacttcaggcgatgcaacaccacccggacaagaaccctggtgcgtctggttggacacagcatagcgtcaggtgcctgccgatccgccgaagagctgaccagcgttggcgacttcgacctcgccgagcgcagacgaccccgacggcgcgcacgccaagtttcaagagatcggccaggcctacgccatcctctctgacgccgaccagcgcgccgcgtacgataactatgggcccgactttaacgagcgcggcggtggtgggcgcggcggcggctcgggcgggatgtacgaccatggtacggccccttgtccaccgacctccaaggcgcggcacttggtcggccttcgacgctgacgtttcacctccttgcttacgaacaggcccctcgcccgaggaaatcttcgcctcgatgttcggcgccggctttggcggcggcgcggggacgtactcctcgagccggtcgagtcggccgcgcgggccgccgcgcaagaaggactccattgtccagtacgaggtgacgctcgaggagctctacaacggcaagaaggtgcggccatgctcgcaggagcgatcgctttggctcgtgactgaccagatggacccgatctctcaggttatgatgaacctcgagcggcaaggcatctgcggcacgtgcgaagggttcgtccaggttctctgctacgccgcccgctctgatccttagcgtcccgctgatcgcgccgcaatcgacagctctggcggcaagcgcaacgccaaggcaaagcagtgtgtcaagtgcggcggaaaggtgcgtccgctgaagctctgctcgtcgagagggatgagaaggctgactgccgcgccgtcatccgacagggctccatcatggtcaaccgattggtgcgccttgccgaaaacccggaagctgacttaatcctgacagtgtcgccctctgcttctccgccagctgaacggcgggctcatggcccaatcgcgcggagagtgccccgtttgcctcggcgagggcttcaaaattcgggacgtggaccagtgcgtcaaactcaagcgccgcagacgtcgcttatctgctctggtgctgactgattcttacccctaccctcgcccgccagatgtaagaagtgcaagggcgccaagacgatgaaggagaagaagaagttcgtctgggaggtcaagcgtggcatgcgccacggtgagcccgtcattctgcaaggcgagggcgacaaagctgtacgtgcatggcctctcctgatgtttgtctgcgacgcaacgctgaccttgcctgcctgccgccctcgtagcctggagcgccccctggtgacctcgtcttcgccctgcaactcaagccgcatccgactttcagccagagtacaacgagcgattacgacctcttgacgaccgtgcgtcctttctccctttcttccttctcgacctattgctgacctgtttccttcactcgcaggtgacgctcaccattgccgaggcgctcaccggcttctctcgggtcgtcttgacgcatctcgatgggcgcggcatctcgctcacggtcccgccgggcaaggtcgtcaaccacgggcagtcgttccggatcaagggcgagggcatgccaaaggagcctgggtcgtcacccgagaagggcgacctctggatccggtgcgagatcgagaaggtgagatggcttgccttggcgacgcttctagtcggtgactgacaccaccgacacgcttgcccctaagctggatgaggactgggcgcggaaggtggaccttgaggtgcgtagctcggagcctgttctttccaagcccccgccgaggctgacgctttctttcgttgcatcaggcacttgccaagctgctccctccgaagcgcggcaacccctaccccttgccggagaccgtcacgcaggcgcagtacgtgcttgacgagaagccgcctgtacgtaccagcctcttcaccgagagcctgcctcatgtacgagctgacgccggttgcctcggctctgcagcaaccgatcccgcgccgccacagcaccgaagccggcgactactcggaggaggacatgggcgactacgacgactacgatgacgaccgtgagctttttcctccttcgaacattgctatccctacttcggcagatgacgacgccgttcgtccaaccaaagccgaccggcgtcccgtcctcgccgccgccgccggtaaactctcagctcacacgtccagtccaactgactatcgcgcgtctcgccctcgccaggccttccctcaacacttcccccagccccttccctcaagcgaaactacaagcccctgccccaactctcagcgagcactgctcagcccctgccgatccagcagcacaccctgtccttcctcccgccctcggcgcacaaggcctatcaagccctccggaccagtcatctctaccctcaccaccaacccctcccgccggccctcccgccgctcccttctcgcgcgcgcgcaccagcaacgacgcccagcaagccgctagagtcgtttgacctcgaccggctctttccgaccgcagacgacattatgcttctcgagacgacgaccaaggcctttggctttggcttccactcgttcgcaacggcggagccgacggccgcaccaggccccatcgacccgaccgccggcgctgcgggcgggacggcaagcccgtcgctcgcccagccggtctacgactttgaccgctttttcgaagaggacccgacgcccaacctcgactactcgcccctcacctcgttctcggcttcgccagagtggtgcccccagccgctctttggccaggagggcaaggaggccggcgtcgtcgacgacagcccgtgcgtgtcccttccgcgtcgcatctcgcacaaagtcgtcagctcgctgacagtcgccccgcccctcctcccctcctccaggttgtttgcggccgaagactcgttcgactttgacttttccggcccgtcgctctttggcgacgcgccccttttcccgccggccaagccggcaccgacgacgacggcaacggcgactgcagcggcggtcgagtcgacgatgacggctgctgcgtcggcgtttgcggcgctcgaggcgtcgctcgcccatcttccggtcaaccctgccctgacgctcggcaagcagcacgcggccgcggccccgacaacggcgcctccctcggccgtcttttcgcccgctctcccctcggccgcgattcacatgttccccccttccccacctcaccggcaaacctcctcgccctaccccacttcttcctccacggcccgatcagcgctcgccgcccccgccgtcgcacgccgcgcgaccgccccgaccggccaccgcaagggcgtcgttcccgagcagctgctcgacctcgacgcgccgacccaggcgaggtcgtacgtcgcgccgtcggcgacgtcgcgcaagcggctgccggcggcgttcgaggcgaagggcggcgcgaagaagcgcaaaacgacgacgacggcggcggcggatgacgcatcctcgtcgacgacccctgcaggcgacgacgggggcgagccgcctgtcgagctggccgactcgatcgaggctaagcgccggcagaacacgctcgcggcccgccgctcgcgcatccgcaagctcgcgcacgtccagacgctcgagcgctcggtggctcagcttgaggcggacaaggccgagctggtgcgcttcgccgagctcgcgatgcgcttgcacccggagcttgcggccgtcgacggatggggtgcgagggtcgcggcggcctcgacggggccggccgaagacggcacgcagccgatgccggcctggggcgaagacgactgagtcgccccccccccctcttctactgtcgtaaaaagggcgtttcgccctcctcttctcttctacttagcttcccctaaccttcttatcactcttgaacgctcgtccggcccttctctttcctcctggtcttccccgtgcccctccctccctcgtccgttttgactccaccaccctcctccactcccacccttcctcctcaccgtccaacaccgccctccaaccgccgtcctcctcgcctttcgccagtctattgccatgccgcctgctactcgactggcacgacgtcggggctcctgggagggagaggggggggagagggaggatcaagaggttctttgcgaggcaggcggagagggaggcgagggcggttcgagacgtgtccgacaaatactctctcgcctgacgccgatcggggcgcggttcgctaagctgaccgccgtctctctaggtaagcaaggcgtgttcggttcggggacgcggcaaatctactaaggcctttgacgaacgcgacgcgcaaaacagacgaggcggagacctcgctgcgcgatgatgctagcagccctccgcgtcggcaatccgtcttgacctccacttgcctcgccgtcgaatccgattacggaagaacaggacgtcgctctcagcccaaaagagcgttgcgacggaccgtcttcttcctgcatcgactatatcggccggtatgccctgccgacagtcaggctggctccgaatcagaggcgtcgtggcatttggccgctggcgcgcccggcgcacctacacccactgatcttgctccttccatcagggatcgcctggtcgctcacgacgcggaaacgtcggcctcgtcttgctgcatccgaccaaaactttccgaccgactgagctgccatgtgtgagacaggatcagtgaatctctggccgcaccagcgtacccaagtggccagtgtcaaactccgcctcgcagcgcgacgcgtcgcgcagcgcgccacccttcgactcgacgggtccgcgcctttcggccgctccttcctgaccctcaccacctctttgcgctacccctacacctcttacccatccttccacaccaccaccatccactccacattcctttcacttccatccaccatgcccagcagcaccactcgcaacacctgccccgcacccgccggcactcggcccgcgcgcccgcgcggcgtcaagtcccagattaaggctcagactgtcaagaaggagacgatgaagatggacgcggttccgccgatccagcagtccgagcagatggctgacgagatggaggtcgcgaaggagtcggcggtcgaggcggtcgtagaggagacggctgccgaggccgccaaagcgttgctggctctgtctgtccttgctcctgcggccgtcgctgaccccgtttccgctcccaccttcacctcagagcccgcgcccgccttcgagcacaccgtcgtcatgattgacgtcgaggttgtggcgcgtggcctgctcggcctccaagcggcccgcaccaagctcaacctcgaggtaggccactccctttcgccgccggccgacgcgccggcggccgtcgctgttgatcggcgccctccttctactgctactgcggccgacctcgaggacaagaccatccagtcgggcctgcctaccggctgggtccgccgcgtcgacgccggccgccaccgcttctacttcatcgacacgtgagtctctcctctctccctctctccctcgctcgccaactgagactgacccatctctcccctccttacctgcagcgactctgacctgacgacctgggaagagccgactgacctgcccgaaggccgcgagacgggcgggcgcgagacgcctctccgggtcaagttcctcaagcacctcgctaaccgcacgctgacagacatgctccaggcggcggctctcgatgcaatgaaggcgcgctccacgacgatggccagcgtggtgagtccctcttctctgctctccttccgaacgccctctgctgacttgctttcctcccgctctcaggactaccgctgctcgctcttcgtcttcgtttcggctgacttctgctcacgcctggcgttcctacttacgagggaccaccagcaagcggctcggtcgcaccagaaacgggtcaaccggatcaaggcgatcgtctttgatgcttatcccccggccgcctctgctggccgccggactcgtcgccgtcccccgccgcacctcgtagccgccgtcggcggtcgctgaatactgacaagaagtcaccttcacactgatattcgcgagaggtaagttgactcgtactcgcaacgataggtcgcgctcctcctcctttccactctctgcatcggtaagtcggtctcgggtcgcgctctctctccctccgttcgcatcggtacgtcctccgccgccctctcgcttcagtctcgcccagtcgctgacctgtcgaaggcctccacccactcttcctcgccgtcctactctctcgctcggcggatcgatcacccagcgacctccgcctcggtctttccccgccttctcgacttgtctatctctcgctctgtctctctcgccttgtcctttgctctcttgtctctctcgtccttgctttgtctcgctttgtctgcttctctcgggctcttgtgctctcttactcgccttgttgttctcgctctgtctccatggccttgctctctactttcttttcccgtctctcaaagggttgcaagctggtcaacctagtctgcttccttcgtgaaagctcgcttgcgcttttgaggcagcgcgatcgagggcatgagcgagtaaagggtcatcatcgtcgaaggaggatagagagatcgtcggaaggcaaagttaactgcccagtgcgatcgccccctttcatccgcgcagcgacccttttcatcgccctggacgtcgcagcacgagaccggtacgctcgcttcgcgatctgaactgaagccaccagcactgacaccatacggatgaacgtcggtgagactgagcgtagcgaggtcgtcgcctgagatgaccgagacgagaacaaaagcgaccagtccgtgtgcagcggccccgaccggcccatcgaagcctgcttgtacccttcccggcctccaagatctgtctgaaggggttcagaagcaaagccgagcagcttgatcgctgcgagcaggctgcgtgagggggtcgtaaagggcgtgaattggacaatcggaacgtgatgtgcagtgccaccatgcaggcagggtggagagcaagagcagggcaggccggaccggctatcgtctagttctcgggcacgcggaagacggtgatctctgcgagtcgagagaaaagagcgagggtcagctcgcggcacaagcctcagcccgctcggcacggcttgacgcaccattctgcttgaaataccgcctgttctcctcatcaatcaggacgagattgaggtagtagcgcgcggaaaacttcttgttgacgtcccggaatgtcggcgtcagctcaaaaccgccaaggaagagccggatcgggatcgtctcgccccggacgggggcgccgtccatgatctacgcagaggcgcggagagaaggcaaggagagggtgaggagttacgagagcaagcaaagaggacactcagtcagccaagctgccataaggagggcggtcgagggcagcttcgtccacgcacctcaaacttggtgatggtctcgctctcgttgtattggtttggcggcgcgcctgtcgtctcgcgccgaatgatcgagagctccatgtgcttgatcttgatgcggacgagcaaaaagtagattttgccgacaatgacgtcccggaggtggtacctgtttacgggtggccgtccatcatcaggaacgcgcgctcggcgagcaaaggaggaggaaatagggctcgacacacttgctcttattgtactcgaactcaatgtgcaggcagtcttcgatcccgacctccatcttgatcggattattgctgtcgggcggcatccggtacgagtggacccagatctccttttcgcgcacgacctcggccatccgacgggcgaccgtcacgcggataaagtagctgacaacatggcgtcaagcgttagtctcgacctcttctggcgtcagggataggtcgggccgatgtaccggagcttgacattgataccctggtagctctcgtactgcttttcgacattcttgaagctgaagtcaaatgtctgggcctgccggagctcgcccgggctcgccagctcctgggcgagcgacagaaactcgtagtggttgttgcggtcatagaacctgggtgggatgggcaagcgaggagcgaaggtcagcaatgagagcaggcgagcgacgggtgaagaaaaccgaggacgaacatttctgcattagacaagtcgtcggtcgtgcgatggatggtcagcaagcgtcgacttcaactgaatctcgctaactgttctctcaagccgtcgaaggcaggatcgatgcctgccctggcgaaagggaagagtgctcgatgggagttaagcgaggtcgtttgccgtcgaagccgggccgcgccagccagggactctacgaacaatcggccgacatcctgcgcagatcaagcgccgggcatcccctcccgtacgtactactgctgaagaaggcagtcgacgaaccgattgctccgacctggtggaatgtgccgtcgaagagcaggccaacgtcgggtcagcttgtgttcgcgagcgtccttgtccgagctcctctcttcctcgcgcccttagtgtgaacgtacaaactcgaccttgatgccgtcatggacgagcttcttgccgtccctgagccggaccgtcgcctggccgctgaccgtctcgccatcaaagtagactggcgcttgctcggccgcgcctccgccagcgacggtgacggccgagctcgtcgcgctggcgcccttggccggtgtcggtgggagcgggaggtcgacaaacttgcggggcgggaggtgggcgtcctgggcgagccggatgtcgacgtcgaccggctgggtaaaggtaaagaaggaggtcatcctgctgggagagggacgaagctggtcgctgcaggcaggaacggcccatctcgccgtcgctgcctcgccgaggcgaggtcgggcgggttcccacgcgtaggcacttgttagacaggcagcgggagagggaggctcttcacccgacgagctgctcgaacccttccagcatggccatgctcctcagcttactgccgtgatggtaagagctgagcagggacttgtgggcgtaggagcaagactgggtgcggacggagaccgcaggaagggggtcgtccgcagccattgacagcccggccgcagcaagatggccttcctgacatgctcctgaagggcctgagtacgaaaaccttgcatggcacggcagtcgatatcagtggccgtcttggcagccggcaagcatcttccttctaggcttcgagcaagacgggggaatgtcggcagaagcatcctccctcgtcttggacaggtcgctcatctctaggccagcgcccgccctcgcttgcgctccaccgacgcccaccaacgccctttcctccacctactcgtacaacagcaaatgatcaaagaccagcagcagcagcagggccgcaactctgccgccctcgtcggcgaatcgagcggcgggatgggccagtcgaccaacgtcgacgctcagcaagcgccgcctccggcctgtgagcgtcatcgccaccctcgccttcgctcctgcgaactgacccgcccttctcttcctcacgaaagacacgccaaaccctgtcttccagggcctgccgattccctcgagcggccagcaggacgagaccgacgtctggcacccaccggcgacgatcgctgaggcggaccgccgtgcccgggggcgcttcatccgggcactcgccgtcggcttcctcatctacgtcctggcactgtacgtccgcacctcgttccagcgctcttgccagctctcaagcagtaggctgactgccacttgctaaactccatgacaaagatgcctcttcggcgcgcccgtcgaggactcgatcgagcactcgcaccccggcccgccgccccctcggcacaagcacgaccgcgctggccggcccgtcatcacggtcgtctcggccctgtcgccggcgtcgacgggagcggcggtggaggcgcctctaacggcacctgtcgtcgttgttgcaacgggtgacgagcagtagagggactgcaagcctcggggcgagcgccgcccgtcgccacccgtcatctcggctggccgcacaggcccccttcgctcttgatcgccgagtcacacaatctggacttcttctagctgcaagatggaagggagcttttgcctccgtgaccactcgcccggccaagttcaagcccatccaccctgctctcggctgtccaagctcgagcggcccatctgccttctctctccttctccctacctctgtcacccaagctcttgtatcctcgatgtcttgccctcatttcattcacgcccgcatctctgccttcctactcgtctccgtacgagaaagccgccgccttttctgtttgccctgcgaggacgatgagcccttgcccacgccagcaccctttcctgccgctgaggaccggcacgtcgcagcaggccaaaagctcgtctaatagtacccggcaaagtggaggatctggtgcgggtgtcgccggcgatggctctcgagcaggtcgtcaatctcctcgtccatgtcttgcgcgcgctcgatctggggaagagaagtcaacgtcagtatcagcgcgagggcatcggcacagatcagccaagtggggactcaccccctggcagagctcgaggatcgccgccgacgcaatcagcgcctcctcgtggttgtccttgatctcgacgttgatgacatggaccggccggttgaagtcgccgccgcggttcagcaggtcctcgcagacggcgtcaaagcagcgctcctcgcacgtgacgacaatgtcgggcacggtccgcgtctcgtgccagcgctcgggcgcgcgcttgatcttgcggttgcgatcaatcatgttgagaatgccgttggcggtgtacctggcgggaagaaggggcaggcgtcgatgagcgcaggtcctgcttgaggctgaagaccagcggcagacggaggacgcacagcgccttgtccttgcggatgagatcctggtagatgtcctcgtacggcgtgccaaatgggtagatgttgggcttgtcgatcgccggccccggaagccggacggccgagcccgtgccagacgagacgacctcgagcccggcgtcgcgcagcgtcaggtgggcctgcatcgatcggttctgctcgaaacaatcgttcatgcgcttgcgtcagtaagcttgcgagcgtcatggccggggcttgattggggttgaggcattgcgccgacacacctgattcgacgcgcagacgacgcagaagaggagctttgacgatccctcgcctccccctgcactcggcccgcccgggaactgcacagcggccgagacgacgggctgaccggcaacgacgccttgcgcctgtagtgctggcggaggaggggtcgccatgaggcctggctgcatgcgctcgccccagccggctgtcgtcgaggacgacgacgcgccggacggcccggcgacaactggcggtggccccggataagggttggacgactgccgctgcatgcccggcgcctgctgctgctgaagctgctggtgtactggcggctgatttgggtagggttgctgctgctgctgagggtagtgcggcgcgtggccgtaagcttgaggcggcggcgctcctccaaacccgaccggcggccctccattcggtcctcctgcaggcacgaacggtggcggaccattgcttcctggcccattatgcggaggataccgctgctgttgctgctggtagccgccgccgtacggctggccggcgcgcgggtccatcacgagtgaggtggtcgagagtagaggcggggagccagaagtcgctagatcgcaaagcaaggcgagcaggtatcagtcatctagaccctcgtgctatgcgagcggctgtccccgagcagcgagcagcatcgagcagaagaaggcaattggcagcacggcgaggcagccggcaggcaagcgagaagcagcacggcggcagcagcggccggaacctcagtagtatctgacgtctcctcagcccgaccctcgcccattggtgcgatcggtaccttcccaggcgccggcgcaaggctgtgtggggtcggtgaggcggtttgatgaggtctttcgtcgctggtcccggctgacatggccctccctgcctgctggtcaaaggtccggcggcgcgacgcgttgactggcgcaccctcccgacctccaggagtcaagcgacaactcacagagctcggccgagtcggagtaggaagcttctggatgaggtccgtagcgtcttgagagggagggagggcttcaagagaagaggctggcggcagggcgatgctggcggtttgggtgacgaggctgaccgtcttcgcgccgtccgtttgcccttgcaggcgtgcgctcgacgtcgaccccctttgccacaccctctcgctcgttacaacatgctcggcaactcggttccaccctcgcaggtccgtagtaccgtctggcctgcctacttgacgctgagcgctgttcagaagacgaggaagaacgacccgagccgcactgacgctcgctcgtccccctcatcggcccgcccctttctggccttcctctgcccgtcgtcgacaggtcgccatcaagcgtatcaacaaggaggtccgtctgctgattgtgattcccagcaacgacacgggcgcacgagctcacccggtcatctattctcctacgccagattgcgacgctcgtcaaggagggctcgggcgccctcggcggcatcgtcctccacccgagctccgagaaggacatcacccgctgtgcgtggcttcgctcagaactagacgcccttgctctggccatcagtctgacgcgaacttttgggtcgcactagggtactgcatgatccccggacctgccggctcggtctacgagggcggcgagtttgaggtccgtccgcggtcgcgccagacaaggaagtcgccaggcgctcgtcccctctgacgcacctccctctctccctcctccaggtgatcgtccagctgccgcacgactaccccttcaccgcaccccggctccagtttgcgaccaagatctaccactgcaacattgccgagtcgggcgccatctgtctcgacatccttaagagctcgtggtcgcccgcgctctcgctccagaaggtcatcctcagcctgagcagcctcttgacggatccgaacccggccgacccgctcgtcggcgccatcgcgcaccagtacaagacggaccgtgccgcacacgacgccaaggcgcgcgagtggacgaagacgtgcgtgtgccggtgcctgccagtcgccgagatcctgcgcagtcgctgacctctgatgcgggcttcctccttccgaactcccagctttggcaagccgaagcctcggccgaccgttcctgctgcctttgctgctcttcctattccgccaaagatccccaacggcggcgctctcacgaccgcgaagcctacgacgccggttgccgccgtcgcctcgtcgtcctcatcttcgtcaagcaagccgctggctcctgccgcgccggcagccacgacgccgggctcggccaagcgcgcgcggacaacgacgtcgccctcgggcacctctacaagcgccaagcgcgcacggacgtctgacgctggggcccgtgaggtcatcacgctcgacgacgacgacgaggcggccccggtccagccgacgcccagcgacggcggtggcaagggcaaggagactgcgatcgagattgatctcgacgacgacgagtcggcgtcggccaaatcagcgtcgggaagcggcactcagcaggcaaaggaggccaagcagcctgtcgcagcaggcgaagacggacaggcgaaaggcgacgagcatactcaggcgtgggaggccgccggcgaaggcgacggcgttataaccctgagctgagctctgcttcgagatggacatgaggccgctcccaattgcccaatcgccgtcgtcaaatgaaggtcatgcgcatcgtctcggcctccagtcaggcgaagaggttgataccggcgccatcgccccctcatcgctgccctcgtcaccgttccagtcgacgggttcgcccgcccagttgacgtcggtcttccagctctcgagggcggcttagaagccagagtgcccgcgcggctttatgagccgggtgacggtctcgtccgcccacatggctgcggggaactcgatctgacagggcagagaggcctcgtgttcgaggacgtaggcgtgcagcagcacccactcggctttctcctcgctcgtcaggtcgccgttcagagcgagtcgtcgaggcgaatccatttggcgaaggcttttaaggtccagttggccatgacgagcagcgcgaagagaatgccctgcggcgcggtcttgacaacgtgcggctcaatatagtcgtgaggtagccaagccctgaacaggcgcccgtcatgatcttctagccagatgatcgcgatctcgtcgacggggttgccgaagtcgatcgacgcaggattgtccacgaccgagcagacaaaggtcgaaagcgcgacctcaagctgaagccgcccctcgagtcccttgacggcccggctgaggcaaagctgccgacattgctggatggcgttttcgagaaatgcaagcccgtcgtcttctacggcgaacatggtagttctcagactgctgagcttgggaagctgcgcaaggagctcgcccaaaacggggccgaagctcaagtcgtagtcggtgtcgcccgggaagaggaacacgtcccagagctgggagaccgcccgaggagccttggaaaacgacttgatcagacgaaaaatgagggcccagaactcaggatcatcgtttgagtagtcttggttaccgcctagcgtaagccgaccgatcttgacgtcgcgcttgttgagcatgttgtaactgtcgacgcagtccaggaagctctcgaaccgaccagtgctctctatctccaagtacgagtagacgtggtgcagcaggcagttgtataaggcacaattcgtgcacaaaggagggcaagttcagggccgcgcagcacgactgggaggagcaacaagatcgaccagagtagcttggggatgtcgaaggggttgccgccctgcaggtgaggtcaaaaagaatcagtgactctagaattggaccgcgtcttgatggccgactgattgcgaactcacccgcttggctttgaccgcaggcgacgagtggacgacgagggcggtcggagtgtgatccgaggcgctggccgagctgctgcccatctgcaggcggccgataggcggaacaacattccaaaatcgtcagcttgctggtccacgcgaacaatcagacgacgcaggttggacgtaccaccggcgacgagggctgctcggcgagaggggtccgtgctgctgcgccgccgccggtcaacgacgcctcggccgtcttgctgccacccgcggtctcgctagcctggcaagcgaatcaggcaaacgtcggaggtcaaggtcaacagtggtctggcaaaagctgagggctggcgttcgtgagggccattaagggaggaatgaagcgactcacatgctcgcttaccgtctgcgacgagagctcgatgtgtccagcatcgccgttgccctcgtcgccctcaggccgcgaggacgagggccttccgactgcgagctggccggatccggaaccttctgaggagctgctggagtttctgggaggactgccatcttggggaacggacgttcaccgagatgactcctgcaggccagaagacggggccccctttcgcgcgtcgcctcgtcccagcgcgactcacttcgagctgcctgtcgtccaacgaccgctgtcccctccgacgaactttgatcctctgcccagatcagtcatcgccaatggaggtcgactctgcgacgctcctccacaagtatggcctgcggacgctccggccgaccatgtgggaggacgtcgaccacgcggccgagggcggcgagctcgagcacggcgtcgaccacccgcccggcgggctcaacggcccacgcgaggagcccgacccgctcggtctgagagagacagtcgggtgcgtcgctctgccagtctggccgtattgtgccagcctgatgggcgagagcgaaagctcaggatggtcgagctgttatggtgctgatgggccgctctgctcgcctccctggccgctcacccgcaggatcaaggacatggacatccagtcgcgtaggttctcgcacctccagtgaggtctgtggtcgcgtccttgagctgatctttttcggcctttcacacgctccatctcaggcgcggctatctcgctctcatccaagtcgtttgaccccaaggcgttcctcgcaaccgcgcacccgaacgcccatcacggcgacctccaggccggcatcgcccacctccagtcgtcgctcgaccaacgctcgggcgcgctcaagacgctcgtcgaggacaactttgatcgctttgtcggcgtcaaggcgacgacagatggtcggtctttccgtgtggcgctcggcggcgtccttgccgggccgagcgagcgtctcagcgccgcgcacagctgacccgtgcctctcttgcggctttccatcaggcgtctaccaggagatgaaggagacgctcgtcctcccagactctgactatggaacgctgccggtcaagcaggcgctccgaggtgggtctgcagtctcgctgccagcatcgagctcaagtcgtatgcgaggaccgctgacctcccgctcccccgaacagacacctcaaacaaggccgacaccgtctttttaccgatcctcgagaatgcactcaaagcgcagaagctcctgtcgacgctctctgtctttgaaaagtctaaattcttcttcaacctgcctggctcgattctggcctcgatcaaggcggtcagtcgtcttcacagtcgccgcgcgatctgcagccactgagggactgacttcggtccctttgcttactcgccctgcgataggaccgtttcgactttgcgctccgcgactacaagaagggcaagtacctgctcgagacgcggcccggccaactcttgcccggcgtcagcgttaagaacgcccgccagcgcgagcagcaacgccggatcgtcgacaaggtctggggcatggtcgattttgtcattggcgagatgcgcatctcgctcggcgcgctgctgagggatccgctgcggccggtcgaagagcaggagaagatcatcgagtgcgccttcgctttacgcgtcgatggtcgactcgcggacgctgatttacactcggccggttgctccgctgcagaatcctcgtcgagctggatcgttccgccgacccggtctggatgtggctcgactcgcagcacgaccacattcaagccaaaatgaaggccctttttgcgacacacgccgctcggatcgacgccgtccggcagaaggccgagccagtcgcagagatcgacggcaatggctacgagcgaaggcgagcgctcaatctccagcgctgcgtgctctcgcttgctgtcgtcaaggacccgtcggccgtcctcgagggtgcggacggtgtcgaggtctggcgggcgacgcacgatctcgtcaaggctgcgagcgagctgctgctcaagtggctgccgagcttctggcgcgtcggcaaaagtttccttgacggcaagtacaagaaggtgcacaggtgaccttggagtcaaacgagacgacgagtcgctcacgagcatcctcctccgcagacaacggagtcaacgagcataggctcatcgaccccagcggcgactcggaggagcccgagccaggtccggacaatggcccagaaaatcgtccggatctatgtcgctcagctctcggccttcttcaagctctctgcaccgccagcggccccggcgacggcgtcgtcgtcatctggctcgccgccagcctttgtgcctaaggcatccaactccctcaccgccggcgtctggtcgaatcgcatcctcgccgagatcgtcgaggccggaactggactcaacctaaatgaaattggcaccgaggtcgccaaggagtggcacgggctgctcgacagcgcgcgctggaagtttgtcgaggtcatctgcgagacctggaggctcggttcgtcctgagctgctgaccagatcggctctgcgttgcgctcgctgaccatcatgttcacattgtagactcagagcgcttctacccgcttgaagactggatcccgaacgccgaggtgccctcaaccacgctctacatcagccgcgtccaggccttccagaagcacaatgcggccgccgtgtacctcgccgtcaccggtatggagaagccctccggcccgcgatccaaggtgcggccctctgcgcgctgtgattcgtctgttgtacacactgacgccagcttgatcctacttcgcagccggtccctccgcactacgtgaccaaggtgaaaaacacgttctttgacgccctctacttcctgctcgacggcatggtccgcctcagcttccaggactatgagccgctccaggacccgatgaagaccaagatgctcgtttacctcggcggtggcaacgtccctctacccgacgtgcaccggatcgagacgcgcacgctgctcacaatcagcaactttggccacttaaagtcggacgccctgccggcgatgttgcgcgcgttcgagacgtcgttcggcgtcgttacggacgaggaccgccggacgttagccgaggtcgaggaccagcttgacaagatcctcttcgacgactttatccggcgcaaggccatcgcccttcagcggacgatccagcgcggcatcacggccggcatcgactggtaccgcgccagcaagcctacaggtgcgctgcgaccgcccgctgcccttcgctgcgagacgttgactgactctcttggctgcggctcctcctctaatcgcccaacagaggtcggatcctacatgtacgaggtcctgctcgcgatggtcgaggtccacgccgaaataagccgggtgtcgaagcccttgctcggccgaacgctcagcacgctgctcgaggagacagcccgggtcgcgctcgactgcttccgccaagttgaacgcttcgggatgggtggcatgctctcggtgggtcggctgtagcgtttgtgaccgctcttgccgcctcgctgacactgccgttcaacctggctccttgcaggcgacgctcgactttgagtttctccaccagaacatggtcgctcatgttacgccaacgtcggccgccctgctcgccgacgtctacgccgtcatctcgaaagtctactcgcggtcaaacaacgagccggccgaggaactcaaccgcgagctcgaggccgtcaaacgcacgctctacgacgcgcgcaaagcgacgagcgttaactttctctgcttgcgcgacgccaagcctcggacgagcgcgagcagcggcgcatccgacgcagcagccgacaaggcctcagcggctcggacgggagctccgctgggtcgcgcgagcatcagcaccgtcgcctcgcacaatagcgccaagagcggcgcgttagccaaggaccgggagcggaagccgaccgctccgagagtctgacgcccttctccattcctcctcacgccctctttgacgaccctcgatgatcatgtcttgccggaacgctttcaggcccctcggtggcttagagagcagcgattttagcgagcgctagtcgtccatcgcaaatcggacctcggcattctcctcgagccagcccatccaggccttcagataggcgctaccgttggcgactgtgctcgagtcaccgatgacggctagctgccgcttggccctcgtcatggcgacgttgagccggcgctcctcagagaggaagccgacttcgcgctgagtgtgcgagatgttgggtcagcactgaatcagggtggaaagtggactgcggcggcacacctgcgcgtttgaccggacgagggagaggacgatcgcttcgcgctcctggccttgaagcgagtcgacagtgccgatcagaagatccgggtggtccaacttgagtagcgccgacaggtgcgcgacctgagcctggtaggcggcgaggacgccgatgtctttgggcggcacgccgaacaggatctgcaagagcgtacagggcccagatcagccattgtgagacgatgagcgctcaagagggacgaactgaccagcttttcaacgtagctacgcacgagctcggcctcgttttcgttccgcttgctgccctcgcctcccgagccgccttcgtctgttcgctcataaaattcgcacccggcctggtgagaattcgggagtgtcagctttggccaggactgtgatgagccggaagaaggccgcacggtgtcgacaaagacggcgggcggctcgaggaagtcggtcgcgtcctccgaggcgtcgacatcgggcaaagtcgccagtgtgcgggccgccaccgacggggccgactcgagcagcgaggcgtagagcgcgctagaagggtaagcggcgatggcggtattcatcctgcgtcgcgggcgtctcgtcagccagtgattgccttgtagtcggcaagcgatcgacccaccggtactgaactgtcaggatgcgcttgatccctggtccatacagacgctcgagacggccaaagagggtcgtctcgagcgagcgtagagggcgcaagtctcgcagcggtgcgagcgactttccctggcccggagcgaccgcagcagccgactctgccagctgctcgtctggagcgagagctgtcgacgcatctgcgtcttcctcctcggctttcgtcttcttcgcggcagactccgacgccggtgaggttgccaattttgacggtgccggttgaccgtcacccgcggccgccttgtccttcttactccgaagtgccgtagacggcttgccttccaagcgggcggcggacggcttggacgaaagaacagttggaccgagctggcaagggtcgccggcgaggatgagcttccgagccttgaggatcggaatgagacaaacagcctcgagcgcttgcgtcgcctcgtcgatcagaacgacgtcaaagtcctcccccagcagctgacgagtgccggcggtatggcaggtggccagaacgatctaccaaagtctctcgggcggatcagtcgaagcgactcgcaatgctttgggaggacggcaacaacggcgtacctgcgttgtcgagaggacgtcgcgcacgaccttgccctcacgcttgcggaactccttgcggagctcacgcacctcgccatagacctcgccacgcctcttccccttgacggcccccttctccttgcgacccttggcgagcgtgttgagatggccttcgagctcggccttgacgtccttgacgatctcgccgctcgacgagtgcgccgtctggtagtcaagtgtcgacggcagaagggcaggcaggatccgagccgggtgaccgattcgagtgatctgcgtcggcgcaaagatgggcgataggcgtagcaagaggttgtcgaccgagaggttggatgcgccacagacgagcacgcgcttgccctggaccgagacgagctggcggatgacctgcagcacgatggttcgcacagtcagcttgtgtcgaggctgcacacaaacgctgatcgcaaggatttacctcgaccagggtgtgtgtcttgccagttcctggcggaccgtggatgcagcccacctcatctgcggataggacgaagcgaacggcctccttttgcgagtcgttgagcgagttgtcgaaccacttgatgtcggccgctgtcgcaaagcttaggccgaatgaggcgggcgagatgccgtaaagcgtctggaggagcttgagcgaaggatggcttgaagagctgggtgtcgggccgagggtgtcgatgactggctcgccctctgccgaggcaagtggcggcctgtcgagagaagactggccatcggccaccggaaacgcgtctggcaggtcggtacccacaccaccggaggatactgaaattgacttggcctcctcagaagcgtcatgaacgtccgcaacagcagggttgggaatcacacgcgctgcggccggcgagtctgacacgtggaggatccgccggacgcgctcgatcgccttctccattctggcgcaaagactctccttcagcaagagaacaaagttgcggacggttggagcagagcgcaccggtcaaacgtgcccgagttggccgtcttgatcctgcgaccaagagagacgtcagaatggcgcgatcggaggaaaggccggagcttgctgcgcggactgacaggcggcaccgctcaggaaactcgaggtcttcgccgtccttcggttcggccacggcgagcgtgatgcttgtctcagtgacctgtaggatcagcagggatatgtcgatgagcgactggcttctcggaaggaccgggcagcgaaggacgcaccttgtacacgacgccctcgacctctgcgtcagcttcgtccccggcggccgctcccttcgacttggcaccagccttacggacagccatctgcgagacgagcttggctgggtcgccgttacggaagccgtgagacggcagcttcgggtcgctgtggaaggcgctcgagcgagtaaggcagacaagactgcgccagcggaaagggagggtcggtcaggtccgcccggtgagctcctcaaggcggatgacgatctcagcgtagacacgcacctcttgccgcccaggccaagcgagacgcccgagacgctgagacctggcaggccgcaagactacgcgattagcttgcaaggcagcgacgttcgagtaagggccaggccaggacagactgttgcaagccaagcctcgctgggcgagctcgtcgaaggagcatcgcgtcgccagcgccgccgtccgagcttggtcggccacctcctcgtccttcagaagctgagcgaggcggtcgaagtaagcctctagctcatcagagcttgggtttgagaccatcggtgagaaggcgagagaggaagaggcgaaacaggtgactgtcggaaggggaggggggcctcgaggtcgattcgactgaccgacttctcgtccccccttgaccacaatgtcagcgacccgtcgcaagccgctgccgaacgccttcaagctctgcctgctcctctcggccatccttcatgtcggcttgatcgcttacgggagctaccaggacgcccggtcggccgtcaagtataccgacgtcgactacgcggtcttctcggacgcagcgcgcttcgtctgggccggcctcgcgagcgatggcagcgctgcagaccgaccagatagaacggtcgggccactaggaggctggctgggcaggtacgtcggcgcctgacctgctcagaagtcttcagtcgcgttgctgacgacttcagccctgcagcccgtatgaccgcgcgacgtaccgctacacgccgctgctcgcgcttgtgctgacgcccaacgaggccgtccacccggcgttcggcaaggtcctcttcacggcttgcgacctcgtcgtcggttacctgctctttctgctgtttccgaccgggctcgacgggctctcggctaccaagtgggtcgcaggtctttggctgctcaacccactcccgctcaacatcgccacgcgcggctcgtctgagagcgtcctcggcgccctcctccttctctcgctctactacttctgccggacaccccgcagcaaaggcgcgggcggcgacactctctcgcggtccgagattgtcggttcaatcttgctcggcctcgctgtccacgtcaaaatctacccggtcgtctttgcgttctcgctcctcggctactttggccggtcctcgtcatccttccttggccgtctcggcctgacaaccaagggcgtcgcctttggcctcgtcagcggcggtacctttgtcggcatcaccgctctctgctacgctgtgtgcgtcttctcaacctgcgctcggtcggtgacgggtgctgacaacctcgcccgacttttcggacgctcagctggggttacgaggccgtccaccacccttacctctaccacctgacccggctcgaccaccggcacaacttttcgccctacttctatccgatttaccttcagtcggcgcctgcggccgacgcgcagacgaccgtccttcagaccgtcctccgctcgccgctgtcaagtttcgtgccgcaactcgggcttgcgtccctcctcgcctggtcgtacggtcgtaggggtgagctcccaatggcctgggctgtcagcactgccgtcttcgtcgccttcaacaaggtcgtcacttcgcaggtgcgccatttcggccggcctgcggcaacgctgtccctccgaccccgtacttgagctgaaagacttcgtcactcttgcagtactttatctggtacctctcgctcctcccactcgtcctcccgcgcatgcagcttgggcgccggcgcgctatcctcctcacctccgcttgggtccttgctcaggtgcgtcccgtccagcgcgcggccgtcttgcggaccgtagtccagctctgactgacgctagacgtttcatcctgccaggcgctgtggctcagccaggcctataacctagagtttcttggggagagcgtctttggccgcgtctggactgcgagcattggtttccttgccgttaatgcgtgggtcctgggagaagtcatcggcgggttccaatgaacgccttgccagcattgcgcggccgttatgaggcgcaggcgagagggtccgttccagggtcacggtgttgatgacgacgtggaaggagagggctaaccggacaggcacggcgactcgtcgcgtcagcggcccctgcgaggagcgggcgagagcgaccagctcgcctcgcctgccgggtggctgcgatcagagatctgcgtcctcgactacctcgtagccgacgcgaatccagtcgccgcagccgtcgcagccgacgatgtcaacaccgtcctcgagctgcgcggtcgtaattgtgtagagtgccgagcaacggcaggggtgcgtgtagtgcgtcggctcctcctcatcctcgttactcggctcccggactccaacagattgacgatggtcgtagtgtgcctcaaagtcgtcgagcgagaggaccgtccgagcgagcggcggtggaggacggctgttgcctgaccggtcgtatggctgctggcggcacgatgaggctccggccaccgaccggtcgtagctcgccctcatcgctgggtcccggagcactgtccaggcttggttgacctcgagcagacgctcctctctctcctgtccaccctcggcagccgcggacgagcccttgtcgggatggtactgacaggtgcagcatccgtgtcagctcgagctcggtgcctgcgagtgggaggcggggtcgcacgagcaggacgagcgaccgccagcttcgtcggatctcgtctgccgtcgctgtcggatcgacgtcgagcactcggtagtgcgtctgcgagctgccttgccgagacatgccttgtccgggactacagaggagctggtaagaaaaggtcgacgtcggaagctggaaagggccgaccgtcgttttcagccgtcgcctccccctttctcgcctcgacccctcgaccacattcctcgcccgccgctcgcctctcaaccattctcccacagctccagagccgtctgctagactcttgaaaaagaaagacggacctatcccctgccgcctgcctgaccggtcatgcttctcctccgccgcacccggctgcggccgatcgatgctacacgcgcgctcagctgctcgtcttccctcggccaggcgaagcaggaccaggcgggaggcagcgccttcgccccagtcaagaccaaagcgaccggcggggcttccacaaaaacggcacctcgaacgacaggaaacggcggttgggccacatggtcgaacgatagcgaaggtgtccgtccgacgctcttcgcccgttccagcgcagcccccaccgggccgagttcgtcctcgtcgcgctacatcgggcagggcggatctcggacgggtggctcggcgcggagctgggatagctcaggctcgcccaagcgacgagactcgtggacgacatctgatcgatcctcgggcggtgggcgggaccctcccggttcgacgccgcgagcgagtcgaggcgacggcaggtcgtcgatgctggcgccttccaaggcgccttcgaggtctcaagggcgtccgctggtgcctcgcgggcccgcacaggagatgactcccgagctggcggagcaactggccaggaggcgagagctgcggctgaaggaagaggcaaaggcaaagtctcggctggtcgagcgcgacgtctacctgcccttctcgttgtcggtcgcttctctcgccaggctggtcgggcgtcgactgacaacggtccagcgggtcattgcacgggccgggcttcctcacaacgaagccgtccatcgtgcgctgcgcctacttgctcgcatgtcgtctgccttccctcgcgaggctgaccccttttcgaccgccggccgtgcttcgcagtcctcaacgcagaggacgcctctctgatcgtcgccgaattcggcatgaacccgatcatcgacaacgagcgcggcttcgacatccatcccgagccgatcccagtccacaacagccacctgccgcttcggccgccaatgtgcgtcttcttttcggctgttcgctagatctgcagctgacgagctgcctgctctcttagcgttacaatcatgggccatgtcgaccacggcaaaacgaccctgctcgacaccctgcgcaaggcctcggtcgccaagggcgaagctggtacgttcacgtgcggacgtcacctcttccattcctttgctcactcctccgcatccccgctctgcaggtggcatcacgcagcacattggagctttctcggtcgctttgcctccctctgccgactcgaccgacaaccagccccgaacgatctgcttccttgacaccccgggccacgctgccttcacggcgatgcgtgcgcgcggcgctcaggtgaccgacattgtcatcctcgtcgtcgctgccgacgacggtgttatgccgcagacgaaagaggtcatcaaactcgtcaaggagagcgagactgtccagctcgtggtcgccatcaacaaggttgacaagcacggtgccaacgtcgtgcgtctcatcattggccatcaacgacatactacacgtgctgacggcttctcgccttacgggctttctttcagggccggatcaagaacgatctggcgtcggccgacgtcctactcgaggacctcggcggcgaggtgccggctgtccccgtctcgggcctgacgggcgcgggcttggacgacctgatggagaccgtttccactctggccgaggtcgccgagctccgtgccgaggcggaaggccgagctgagggcgtcgtcctcgagagtcaggtgctccagggccgagggtgcgttcagggtgtattgagggaaggagctcaagtctgtttgctgacatgtagctgccctccagcgtcgtcgccactgtcctcgtcactcggggagagctctcggtcggctcaatcatcgttgccggacaaacgtgggccaaggtccgaacgttgacaaacgacaagggcgcggccatcaagaagggcggcccgggtacgcctgtccaggtcactggctggaaggagctgccctctgctggcgaggaggtgctcgagaccaaggacggtgagtcctcggccgtcaaagccgtcgccaaccgtgtacgtgaggctcagatccgtaaggacgtcgccgccctcgacgtcatcaacgaggctcgtcgagccgcgtcggccgagcatactgaggcgtcgcagaagaagaaggacatcaaggcggcccgatcggctgcctgggccgcgggcgagaagatgccggcttccgagtgggtcatcgctcgcaacgacacggaccgaggcgccgacgaggaaggcaagatcaaggagctcctgctcgtcgtcaagggcgacgtcagcggaaccgtcgaggccgtcatctcaacgctcgagacgattggcaatggcgaagccaaggcacgcatcatccggtccggcgtcggcgacgttcagccgagcgacatcgagtttgcggcttcggccggaggtcggtcctcatcatctccatcatgttaatcacgaattctgctgacctgccctctctgcgctcatcctctccagctatggtcgtcggtttttcggtcaagtgcagtcgctcgatcatgacccaggccgctcgctctggggtcgacgtttacctgcagggcgtcatctaccgcctgatcgaagaggtcacaaaccgggtgtctgccctgctcccgccgatcatcgagtcgcggtccctcggcgagggcgccgtctcgcagctgtttgacatcaagaccaagaacggcaagacgattaaggtcgccggctgccgcgtcaacaacggcgtcttctccaagactgagaagatcaaggtttttcggagaggcgtcgagctttttcaaggtaggttttcgaagtccgctcgaccgactgctccggcccgctgaccctctgctgccctctacgccccctctcttcacaggcgacatcagctcgctgaagtacatcaaggacaacgtcaacgaggtccgcaagggctccgactgcggcctccagctcgatggcttcgaggcctttgagcctggggatgtcctgcaagtacgtctcgccttcagaccgatcgtttttcaggcgcttggaggggcgctattcggacgactgacgtggccgctcgcttttgccctcgcagtgcatcaagcttgtcagcaagcctcggactctatgatgacccctgagcacgcggcatcgtcgtcatgagggcatggcatcgccggtggagaaagcgagagcgtgtctacgggtcgatgcaagtgggtggaggctgggacggctcaggtacagtgggcggacgtttgaggagaaagggagagctggggagacagaggggtccttttgagagcgagagaaaagagccagcagaagggatgcaaagcaaaagtcgcagagctgcgttgccagatcgaccggctgacctcggtcgcgcctgcacagctattcgggctgagcgaccgttggcgccgccttctcaccagacttggcctcgggcgaggcctcggaccggtcgttctcgatcatgacaaagtcggcctcggcatcgccgccggtgttcgaactggcgctcacgctcgctggcgccatgtcgtagtcctcgtcgatcgcccggaaagagtggctctcgagcggtgcaccaagctggaccgagtcggatgctgcaggactcatcgggtaagggcccgccgcgtaagctggcagcgggttgtggccggccggcgaagtcgacaggtcggacgacatccagtcgttgtcgtccgaatctgcgccgagcaagttgttgataaggccatcgtcgccggccgggctgcggctcgacggcgcatccgagagggacgacgtcgtctgagagaactcaagctcgccgttcgagtcgggcggcgagtacgacggggtgacgttgaacgctgagccgctggcggcaaagcggtccatcatgccgctcatgctcggtacaccccagccggtcgagggcgaagcccggcccgagtcggttgccgacggggtgtacgacgtcggcgtgtgcgtgccagagacggcagccgacgcggcacgcgatttgatcgctgcctcgacccggacgcgcgtctcgccaccgatgtggcgcgtctggacccgccgacggtagaagaggacgtaagccgccggagtctgtaggagtgagatcagcgtcagtcaaaatgcagcagcagagccagagaaggagcagggcacgtacgacgacgctctgcggatctgatatcgacgagacgcgcgagtcgtcgaagctgtaccaccggccgtcctcgcccgacttggctgccgccgtgtagtgaccgccgccaaggccgccaaagtgctggtcgacgccgtctgtgggtgcgaaaggtcagcgagtctcgtgcagcggcgagcaacaggcaagccgacgcacaaaggtcgtaaacgacgggctctttggtgctttcgaggccaagatcctcggtcgagccgccggcggcctcgatgctgagcgcaatctgacgctcctggacacgaggcgagaggtcaaagtcggtcactggaaaatcgatgaggttatcgatcttgtcgcggaggccgcgcgagccgccaaaccgcttgaggtgaacgacgaggatgtcgggcgtcttccatagctcgagcttcttggtcgccgcctggtgctctttgcactgcagtcgacaaaggtacgaggctttagcgagctatcccgtgagagcagatgtcggacacgcaccgtcgagcaataccagagatcgtcgtcgccgagcgtctcctcgcgcgagaactcgtcgaggcagtcgtcgatcgacagcgtcgtcttggtccgcttcttgccggcctcggcggcgatgctcgggtcggtaaaggtctcgtagcccatgtcaaaggccgaggctgacttgggaccgaggacctcatcgaggacccggtccggccaggtgcagacgatgcccgtcccggggccgaggtagatcggctcgacggcggacgcagtggccagctcattatcgctgtcgggcgagttgggctgccggccggccgaagagtcgccgtaaggcgtgccgagcggatagagctggccggtactcttgccgtcgggtatctgatccgggactgagtcgtagctaggacgggcagaaaagacactgatggcgaagacgggccgcgggaatggtccggcgaccggttcgagcggcgacgacgagggggagatcatctcggatgtggccgtagtcgagctcgccgccgaaggcggggcggccgccatgtcgtcaaagaggatgtcggcaacgggcgggctcggcgcagcgagcgacgggtcgagcggaatctcggtgacgagggcgtccgggtcgtcctcgccgatcgcatcctcggccgcgggcatgtcgctctcactgacctccaccgatccctcctccacagtcatgagcgtgccctcgttgccgtccttgagcaggcgggcgtactggtcgacgaccgcctgcgtgatggtctcgatgctggcagcgtgcgcgcgagagagcgtgacaaagaaaggggcgccgacgaggccatccgagtggctgctgtagcgcgactcggactcggcgctggcccggcgggtgaagacggggatgacaaacgtgtccgggtcggcggcgaaagaggcctgctaaggaaggactcgatcagcagacggtagcgactccttcgagtagaccggcactcacggtgtggcgcgacgtgagctttgccgcgacctcgtaaaagacgatgacgtcgccgctggccacctggccaaacatgtcgtggtcgccgaacgtcttatagaaatagcccttccacagttcggccgcgaagagggtcgtcgggtcctttgcgaaccactggccgagcatctgtttgaccgctcggaatgaggcgtctttcgagaccgagagcgtcaccttgaagcgcttgccggtcgccgggacgaagaagacctcggcctcaatcttcttcttgaccgggaccggcagcgtcaggtacatgaaagggtcaaacgtgatcgagaccttgctacacttggggcagacgagcgtcctggcaggtgcgaaacggcgtcagctcgacgagcgtctcgcgttcggcttcttgccagtggaagcgagacgcacgacttgtactggccctggaagagatcgacaatgaccgagtcgttgcgcttcttgtagttgtcccagcagaccttggccaggcgggcaagctcggcatcgccgccgccgttccagtcggggctctcgacgtagggcttcttcttgatccggttgaggtcctcgtgaaggccgtcgaggaggaacgtaatgaattcctgcgagtcgtgctgctggtagcccgagaaggatggcgcaaagcgcgcgagcgtccgcttgaagtccgaaggcgagtacgacggcgacgagccgtagtgcagcttagtgatgagatcgccgaaagcgtcagcgacctggcccttcatgccgagcgggttcgaccgattcagctcgtccttgtagacgccggctgtcacgagggaggtggggtgtggttgtcaggctcctggcgaagcgaccgacgcgattgggacgacgtacccaagaagtacttgttgagctcggtcgtgttgctcatgcactgaatggccgagttcataaagcacgtgttgccgctgaagcgggaacagagaatgcgggttcagcgactggacgaaggggcagcgagcagggcgcgaggcacgcacaggttggagagccccatcaggccactcttgccgcggccgctaggctcggcaccgctcgcctttgaccgcgtcagcatgccggtgatgccgttcaagccgctcatgaacttggagccggtcccgccgctgctgccgctgccgctagccaaggcgttgcggctctcgagcgagctgacgtagccctgcgtcgcaaaaagcggaccgacgagcgtcgccggggccggatcggccgagctggtctcgcctgtcacaggccacgggccgggcggcgagccccgccactcgacggcaaggatcgtgccgtcggcaatgtccatcgactcgaccgtctcgctctcagtcggcggctcgaggacctcggcattggcagccctgacgtcagcgaccgagaggaccgccgggtacggacccgagccgcgctcaaagcgccagaggcggcactcggccggcgaaatctgaatcttgcctcggcagaccgaggagagaaagacgtggtagggacaagctgccgagaatctagccgtgtagggagtcgggagcgtgacgcggacgttcttggggtccgaggggccgaggatgaagtggatgtggaccgagggttcctgcgcgtcagcagagtcacatgcggtggtcagcagagaaaggcaggaggcaagtgttgagctctcgcgagacggacgtagaactcgacccgctcgttgccaggcgtggagccggcgatgaccttgcgcttgatttcggcgtcgtagccaaaccagtcgacgagcagccgccagaccgactctggcaccatctcgacgtcgatgctgtcttgaagattcggcaggagttggccattgtcgtcgaggaggccgccgttggtgattggtcgcagcgcgtcgagaggctcctcgggcgactccataagaagcgcagcgaagcggcggtaccactgtgagtcggaggacggaagccgacttgcatcagcgtctggtgggtcgcgcttcccttcctcttgcacagttcccttcccgagaacccaccttgcggtcgacgaggtaccatgagtccttgacggtgagcggctgcttcttgagatctgcaggctcgaggagcaatccggtcagcttcttgccagccacgaagggaggtcgctgggtccgcgaaggaatgtgagagcgagggaagaaccactgactcgtcaccatggcgagcttctcggcattgctcaggctgcggtcgtgctcggcttgctgctcggcagcaagttcgacctcgagctctgcactcattgtcgacggctgtcttggcagtgagcccgaagcagagggcgtcgggccgacgacggtcgccgaactggcggcctcgtcggcgtcgagtgacgacgcgtgctcgtcgactgaaggcaccccaagctcggcatcatccgcctcggccgcatccgacgacaggtgaaggtcctccatctgcccctcggcaacctgctgctgattctgccgctggagaggcgagccggctgcgccctccggctccggctcgagagcgagtgcctggtcgacggcgacgcgaggcggcggcgagcgcgaggccgacgagctcgcgccgtcgctcgcaaaggccgggtcctccgacatggcccgcttaggcgaagacgtctccgagtaggcgtcgcgctcaagcgtccgcttctggccctgctgcattgggtggaaagagagaattgggggggttggagagagagagagagcagagcagggcgaggtccgagcgccctcgtcgagctggaggaccccggagagatttgtttttttttctcgctcgccctggcagcgcgcgcgccgtgcgtgcgtgcgccttgcgattgagccagccagcccgacccgacctctctccctccataccttgctcctcttcctccctctctctatctccagacgcacacgagggaccggctcctgctctctgaccttgtgccgcaaacttctctagaccgccactcccgctcgcaggcagtcggcccgccgcacgccgccgccgccgccggtccgcgcgacctcctccctccgacgctcgcgcttggagcccggcccgccggctcgccacgatggcctcgcagatgaactcgcaggtcgagacgtttaccgtcctcttccagaagctcaaacggacgaggtgcgtgtcttctccagctctcactcatcgtctgcccgcttgccaaagtcgtcgatctcacacgccggccgcgttctcaggaccgaggaggaacgcttgacggccgcgctcgatctcaaggactacgtacgtcccgccttctggcctcgacggcccatctgacgagaagcgcgctgatcgcttgctcttgcgtagtgcgtcgaggagtactcgggcgaggagcggtcaaagatcctctggtccgagatcgtcagagagctctttgcgctgccgcatgaccagccgcgcgaggagaagctggccgtcctggcagggatgagtgcgtcctccgagagcgcgagcgagcccgtgacgcttccagacgctgatcgtgccctctgctgtcgccagtcgagctcgtgtcgagcttgcagcttccagtctcgcaccagattctgctccggatctacggtcgtgcgtcacttcgccagcctcgatctgtgcttgccaatgcccccgctgaccgtgcttgagaaccctcgcgcagtactcttccgcaagctgtccgaggaatacttctcgcgcaaggactacgacgttactgcccagacgtgccggctcgtcggcttcatggctctcaagggctcgcgcagcgccgagatgaatatgaacctgagcacggagctcaagacgttcatcgccatcctcggaggcgagcagcccggtctcgcaggtgcgttggccgctctcttacagctcgactgcagaccgtgggttgacactgaccctggctcgctgccactcgcaggcaacgacatcagtcgttacctcctcctcatccgcgagctcgcgctcgtcgtgcccaatatcgtccagccttacgtcccccaaatactcgcctacatctggtcgtcgctcaaggaccagcgactcgtcctgcgcgagcgagcggcgctgctcgtttcgcagtgtctccaaatccattcggccagcccgggcccgacgcgcgacaccaagggccgcttccagagctacgagaagctcctcgacgaggccaagaacggactcatccagatgggcaacatggaggccgtccacggcagcatgatggtctgccaggcgctgttcgatcacggcgagatggtcagcatccgacgagctcgcgtctcaggtaacctgaagctaaacgcgcccttttgatctcactcacagttcatggacgtacactacgacaaggtctgcgacctcatcctccgccacaaggagtccaaggactcgatcatccgcaagacggtcatcactctgatcccgcacatggccgcgtacgatccgcaaggcttctgcgacgagcatcacgccggcgggacgacgacaatgatgggcttcagcttcctcaccgtctcgatgcgcttcctgctcggccagctcaagaagccagaaaaggcctttggtgcgtggtccgctaccgctcaacctggaagatccgttctgaagttagactgcctgcccgctcgcagccttcctgagcatcggtcacgtcgcggccaaggtcgggaccgagatgaagggcttcctcgacgccattctgacggccatccaggacggcctctcgcagcgcggcaagaagaacgcgccgcccgaggatccgatcttccaatgcatcggcatgctcgcccgagccttcggcccaatcctgacgaagcacatgcacgacctgctcgagctcatgtttgcctcgggtctcggcgagcctttgcgtgaggcgctcatggtgacggccgagtcgatcaagccgcttcagcggacgatccaggacaggctgctcgacatgctcagcctgattctgagcggcaagtcctaccggccgctcggcgcgccggtcaagcgtgggacgctcgcgagcgtcaccaaggacctcgccaacctctcgacgaacggcgccccggcccagagccaggagacgatcgcgctcgccctgcggacgctgagttcctttgactttggcggtgcgtctgtgtagcttaccggcggcggaagcctcgcgctggctgacagactccttcctccttgtcgcaggccacgtcctgaacgagtttgtccggacctgcgcgctgccgtatcttgaggacgatagcatggaggtccgccaagcggccgccctgacgtgctgccggctcctctccaaggaccccatctgctaccagacgagcgcgcactcgatcaaggtcatgagcgaagtactcgagaagctcctgatggtcgcgattgccgaccccgaggcacgcattcgcgagacggtcctccgcgagctctcggacaagtttgaccggcacctcgcccaggccgagaacgtccgaacgctcttcatcgccctcaatgacgccgtcttctccaatcgtgagctcgttatcggcatcattggccgtctggcgctgcataacccggcctacgtcatgccctcgctccggaaggtcttgatccagatgatctcgaacctccagttttcgacgcggatgtgagtctgcttccttctgtcgactgtgcgtcgctcttgctgatggccaacccatgcctgcccctcttgcagccgccagaaggaggagacgaccaagctgctctgcttgatgatcaaggagacgccgacgctcgtcatcaactacacggccgagctgctcgacgtcctgctccgggcgtcggtcgacgtcgagtcgacgccagtcatcgaagcccacgtcctgacgtgcctgggcgagctcgcccaggtcgcgggcgagaacatcggccccaaggtgatggagattatgaatctcgtcatccgcacgctccaggactcggcctcaccgacgatcaagcgcgacgccgcgctccgaacgctcggccaggtcgcctcgttcacgggcaccgtcgtcgacccttacgtcgactaccccgaactcctcgtcatcctgagccgactcgtcaaggtcgagagcgcaccgcacgtccgcaaggagacgatccgtgtcattggcatcctcggcgccctcgacccctaccggcgcaaggtgctcttcgagaaggtcgacgaatcggcaaaggagcacattcgctcgcagcacaccgacatctcgctcctgatgacgacggccggtagccagtcgaacgaggactacttccaggccgtcgccttcaactcgctcgtcggcattatctcggacccgggcctgagcgcgctccactataccaaggcgatggacgccatgatttacatcttcctgacgcagggcctcaaatgcgtctcgttcctgccgcaggtcgtgccggcaatgctcgctgcgatccggcatagcagcccggcctaccaggggccctggctcaccaagctcggcagcctcatctcggtcgtcaagcagcacatccgcaatttcctcgatccgatcctctcgatcgtcctcgacttctgggaccacgccgcgctccagacggtcgtcatccagctcgtcgaggtcaccgcgcgtgcgctcgagggcgaattcaaggccttcatcccccgcctgctgtcggtcatcctccgaacgtttgacgccgacgcctcgaagcaccagtcggccgtcctgatcgcgctcctgcacgcgctcggcgcgtttggcctatcgattgaagagtacacgcaccttatcctgccggcgattctcaaactgctcgaccagcacgacacgcgccaggccgtcaaggagacggccatcagcacgatcggcgtcctcgcccgccaggtcaacttttccgagcaggcctcgcagatcatccacccgctctcgcgcgtcgtccttgcggcgaaccctggcgaccaggattcggaggtgctcgccaatctcgcgatggacgccctgtgcgcgctcgtcgtccagctcggggccgactacgcgatctttatcccgctcatgcacaaggtcatccagacgagcaagatccagcactcggcgtacgactcgcttatcacaaagattctcaagcgcgagcgtctgccgcaagaattcggcaagcaccattcgtcggccgtcgggaccgaggtcaaggcgacggctccggcccagtcggcgctcaaccagcagtcgctcaagcagacgtgggacacctcggtggtctcgacctctgacgagtggcgcgactgggcaaaaggcctcgggagcgagctgctccgcgagtcgccctcggtcgccctccgggcctgccaggacctctccgaggagcacgagccgctcaaccgcgagctctttaacgtcgccttcatttcgtgctgggtcacgctctacgagccgtatcaggaggacctcgtcaactcgatcgcgaccgccatctcggcgcccaactgcccgcccgaggtcgtcaacatgctcctcaacctgtgcgagtttgccgagcacgacgacaaggtgttgccgctcgaccccaaaatgctgggccagaacgtgcgctcgtctccacgtgcgctattctctcctccgcaagctgacctcctgtttctccgaccctgcaggccctgcaacaccgggcgtttgccaaggcgcttcactacaaggagctcgagtggttcactgacccctcggccgatgtcgtcaaggcgcttatcaacgtcaacagcaagctccagcagcaggacacggcctggggcatcctgacgtttgcccggcacgaggacgagcagtttgaccactcgcagttcgagtacgagcgctggtacctcgagcttaaccgttggcaagaggcctacgaggcctttgaccgcaagtcgctcgaaggcgaggaggacagcgaggttatttttggcaagatgcgctgcctgcatgccctcggcgagtgggacaagctctcggatttcgtccagagcaagtggggctcggtcggccaggccgaccatcggcagatggcctcgctcgcggccgccgccgcctggcagctcaagcagtgggacctcatggaggactatgtcgccgtcatgaagaaggacacgcccgattacttcttctaccgcgccgtcatctcgattcacggcaaccaatttgccaaagcgatgaagtacatcgacaaggcgcgcgtcagcgtcgaccccgagctccactcgctctttagcgagagctacacccgggcctataagtgcgtctgctgccgcgagcttgttggtctccttgtgctgacgtcttgttctcctccagcgtgctcatccggatccagatgctgtccgagctcgaggagatcatcacgtacaagcggcaggccgaccagccgcaccgccaggcgacgatgcgcaagacctggatgaagcggtacgtcttagtcggctccaaactcaccctgctgaacagtcgctgacgactcgctctcttgcttcgcgggcacaggctcaagggttgcgagcaggacgtcgagatctggcagcgcgtgctgtcggttcgaagtcttgtcctcacgccgagccaagacaaggacatgtggatcaagtttgccaacctctgccgcaagtcggaccgactcggcctggccgagaagacgctcaactcgctgcttggtccgcaggatgcgagcgcaggcgatggcgtgcgtccaatttgccgaggagatcttcaatcgattgcgtatgctgacccattccaccctcttcggcctcctcgcaggctcttcaagccccgccgcacgtcgtctacgcctacttcaagtacacttgggcccagggctcgaagcaaaacacgctggcttggatccagggcttcacgctcaagctgacggccgacctcgggctcgagtcgcccgactttgtgcccgcgcccgaggcccgcaacgagtttacccagctgcttgcccgctgctacctcaagctcggcgagtgggacgttgccctgcgcgaggattggatcgcggtgggtgcctcttgctcgagtcgggggcatgtcacacgatcggctgacctcctgctcactctctcgccaggaccacaacgccgagatcttgacgtcgtatcggcgggctacccagctggatcccgaatggtacaaggcctggcacgagttctccctgcgctcgttcgaaatcatccagcactttgagtcgcagcccgacctggtcgactcggacgtctttgcgacctacgtcgtacccgccgttcaaggtgcgcagcctgtcccgtctcacatgctcgagcgagcgtgagcgagcgatcatgctgatacgagctctcttctcggctaggcttcttccggtcaatcgccctctccaagggcaactcgctccaggacacgctccggctcctgacgctctggttcaagtacggctaccacgacatggtcaacattgccatctcgcagggcgtcggcagtgttagcatcgacgtctggcttgaggtcatcccgcagatcatcgcccggatccacatctcgaactcactcatcaggagtgcgattgcccagctgctcaacctcgtcggccgggcccacccgcaggcgctcatctacccattgctcgtcgccgccaagtcgcaagtgatgatgcgcaaggaggttgccaacagcatcatggaccgcatgcgcgaccagaatgcgctgctcgtcgagcaggcctcgctcgtctcgcacgagctcatccgggtcgcgatcctctggcacgagctgtggaccgagggcctcgaggaggcctcgcgcttctactttgccgagcacaaccccgaaggcatgtttggcgtcctcgagcctctgcacgacatgattgagcgggtgcgtcggcctgcctccttctccatcacagaggggccgaactgactgacgccttccatccgcccttagggcgccgagacgctgcgcgagcagtcgttcatccactcgtttgcccacgacctcgccatcgcgcgtgactactgccgccggtaccgcgcgcacggcgacgccaacgacctcagccaggcctgggacaactactacatggtgttcaagaagctctcgaagcagctccagcagctgccgacgctcgagctgcagtatgtctcgccaaagctgctcaaggttcgcgacctggagctcgccgtcccaggtgcgtccgccgaccgttcaatcccccgttctgggtgaccctcggccgctgataccgccctcccttctcaggcacgtatcggagccggcgcgaggtcatcaagatcgtcagctttgtgccgactttcaccgtcatcacgtcgaagcagcggccgcgccggctgacgaccaagggtagcgacggcaaggactaccagttcgttctcaagggccacgaggatcttcggcaagacgagcgtgtcatgcagctctttggcctcgtcaacacgctcctctcgcacgaccccgagtcgttcaagcggcacctgcacatccaggcctactcgatcactccgctctctcccaactctggcctgatcggttgggtccaggacaccgacacgatgcacgtcctcatcaaggactaccgcgagtcgcgcaagatcctcctcaacattgagcaccgactcatcctccaggtccgcccgccagccgtcttgcgcgcctctcattgaatctgccgctgacgacgcctttccgtctctcagatggcgcccgattacgactacctgacgctgatgcagaaggtcgaggtcttcgagtacgcgctcgagaacacgaccggccaggatctctaccgcgtcctctggcttaagagtcgcaattctgagtcgtgggtcgaccgccggacgacctacatacgctcgctcgcctcgacgagcatgattggctacattctcggcctcggcgaccggcatccgtcgaacctgctgctcgagcgcgtcaccggcaagatcgtccacattgactttgtgcgtcgactaacctgctgtagcttagccctcgctgactctcccttctctcttccagggcgactgcttcgagatcacgatgcaccgcgacaagttcccggaaaagattccgttccgcttgacgcgcatgctcacaaacgcgatggaggtgcgttcgctgcgcgctttccacttgcgtgcgcagatgctgaccgcctcaacgtctcttcgaccagatttgcggcgtctacggcggctacagccggagctgcgagattgtcatgcgcgtcgcgcgcgagaacaaggagtcgctgatggccgtcctcgaggcgtttgtctacgacccgctcttcgcgtggaagctcgtcgccaccgcgccggccgatgcccctgcgccagaaggttcgtctcttttgtcgatcaatccgcccttctccggaggactgacgactttcactccgtgtctgcagtcgacggcggtgagcgcggctttgctggcggcaaccgccgccgaggcgaggaaaatgaggagctccgaggcgtcgacggccgcgaggtccagaaccagcacgcaattaaggtcatccagcggatccaggacaagctgacgggccgcgacttcaaggcgtcggtcgtcttaccgatcgacgtccaggtccagaagcttatcgagcaggcgacgagcatggagaacctctgccagtgcttcatcggctggtgtgagttgcttccgtttgtgtgacctcttgcctttacaggactctgacgcccccttcgctttgctacctcaggtgccttctggtagcggccgaccttcaacccgcagtcactcgatccgacccgctactctcgctctctcccctttgcatcgccccgcatcatccctccagcctctcgatggcctctttgtatctcacgccaacacgtctcgcaccgtcacgaccgcaacgacccaccccgcctccttcggcgtctctagcatgtccttttcctgtctttctcgctttttaagattgggcgaggccatgtgaataaagcgggacggtggcgagcgaagatgcggtgtcgggcgggcagtttgacagacagcgagcgagtcgagagacgttggcgagttgggaggagtggataaggagcgaaatggaagtgtgagggagggctgcagctgatgggcagaagcaggtgcaaggccgcaatcacttgcgcttcttgcctggcgtcgagggccgcttgaaaaagtaggtcttgccctggcgctgagctggagaggatgggcgacatcgaaagtcagtctcgtgtccttgggtaagcacgcatcaggagaaggagacgcactgcctcgaagcggccgcatgagcgagccgaggtcggtcgcgcgcgtcgtgtctgcgtcgcgcgaggggtcgtagaagtactggtcaagcagcggctggcccgaggcgtcctgcgagcagagaaaagtggagttagctcgtcgacctgcatgatcatgaagaagagtgaagggacggacctttcctcgccggatgacgcgcccccacatgccgcccttgttgacctcttcaaacacccagctctcccactcttcgatcgagccctcgcccttcaacgacgggctcgtctcgagcacggcccgcacgaggtccgggactgcgagcgacgtgacgtgggcgaagacgagggcggacgacaggagcgaggggaggtcaatcgacgtcggcgccggccgggtcaggatgatcttagccgtctgagcaggaacagcggccgctgtagacgcagccggtgtactgggccggctacaggctgccgacgacaacgacgtcgatggaggcgcagccgacggcgctgacggcgtcgatcgtgcgagctggctcggcgcgaaacgacgtgcagcggtaggcaggcccgcagcaggcggcggggacgaggccgacgcgagcgaaagcggggacgaggcgagcgaaagcggcggcgaggagggcggcaggacgttcgacgatacaggccgcgagatcggctggaaaccagcgtcgtcgtcgtcggacgagcagtcgaggttcatgccgtcgttgtcgtcgccgtcgctgtcggacgaggaggatgagcgctcagagaccgacgacgacgacgcctggtcctcgctctccgtctcgtccgcgtcgaccgcgacaggtctggtgatggtgcggctcttaccgagcgtagcagcggcaatggcaggtacgacaaaagtgtcgttggcgagcgccccgaccggccactcgaagacgacttcgactccccagaagccgatgcggagcggtccggcccggccgctgctgctcccctgcttcaggacgacctcaacctcgcctgtgggagcggcacgccggacctcaccgtgcttgagggcatcgacgagcacgaccccgccctgcccgacccgccggccctgaacgcgcgcgccattcaggccgagcacaaggacgcgtgcgagcgccgttccgacgagctcgacgacgacgtgcgtcctcgaggcgtgcttagccgtccgcggcaaaggcaggcggaggacggccgcctgagggcggacgagctgggcgtgaatggcggtcgggagcggggcgaacggcttgggctgaagcgggtgcggagagcgcgtccggccgaggaggaaggtgtgcgtcgacgagagaggaacaggtgcgtgcaggacggtcggggtagtcgaagaagtcggcttgaacgaggatgaggtcgagagggtcgggacggtgagcgaagaggaagatgacgtggtcggcgcgtcgacggttgcggacgcgtcgcgcggtgggagaggcgcgtcggccgcgcgcccgactggccgcttgagcggcatggccagcagccggcgctgctgttgcggcggcggcgacgaggaagccggcgcgagatcgtcagacaacggcgctgctgctgccggtcgacgactcatcggccgaacgggcgaggacgacgtcggcggcgtcgcgtagcccgagacgacgaccttcgacgcgccctgcttccgacgcgcggcgtgcccgcctcctccgactgggacgaccgcgttcgggtggagcgagccgaggacgagccgcttcgccggtccttggccagacgccggtcctccgacggccggtcgcttcgtcccgaggagatttgctggcggcgaagaggacgccggcggcgtcggctgccgaccaaagggcgcgtcgcgtccaacgagcttcgacgcgccgacgagggcgcgaccgggccgggcgggtgaggacgaggcggcttcctggccgtgggcgccggtcgtcggtgaggaaggatggaagtggaaggacggatacgacatgtcgctagcgtcgctggggctggaggagaaggatgatgggcgggagattcgagggcaggcgacgaggaggcgagccgaatgagcgcgaccgacgcgcacgggcgggtgaaatctcgagtccccgacgcaaccccagaagcagcccaatctgggcgaatgtctttatgcagagggtgcctcagacacccgacgaacggtcttccctaggtttgctcagactgacgcgaggcactgaaagaaaggagaagtgcattaaagagtctctttgcggtcgtgaggtggggagagggcggtcaaagggcgggacggcgcggctgtgtaagggctctgggttgccagagggacctcgtctaacgcaccgccggccgcccggacgcccgccttttcgggggcgcggaggaaggaaagcgaagagcaggtgagcgttttacatgcccatgccgcccatgccacccatgccgcccatgccgccagcggccgacgggcccgacttgtcctcaggtgcgtcgacgatgcagcactctgacgtcgtcaggagcgaggcaacgcccgaggcgtcaacgagcgccgtccggacaaccttgagcgggtcgaggatgcccgaggcaatcatgtcgacgtactcgcccttagcggcgtcgtagcccatctggaactggctgccgtacttctcgagcaggtggccaacaacgaccgagccctcctcgccggcgttgtcgacaatttgccggcagggccggacaatcgccttgcggatcatcgagatgccgagcgactggtcaaagttgtcgaaggcgacctcgttgagcgcgagcgaggccttgagcagggcggtgccaccgccagggaggatgccctcctcaacagcggcccgggtcgcgttgagggcgtcatcgtaccggtccttcttctcgccgacctcgacctcggatgagccgccgacgcggatgatggcgacgccgcccgagagcttggcgagccgctcctggagcttcgaacggtcatagtcgccggtggaggcgtcagcgatgacggcccggatctgctcggcccggttctcgacgttggccttgtcgcccgcgccgtggaggacgaggcagtcgtccttggtgacggtgaccgagccggcctggccgaggtgctccggctgggccttgtcgagcttgatgtcgagctcctcagtaaagacggtgccgccggtgaggatcgcgaggtcgccgaggatcgacttgcggttgtcgccgaagccgggggccttgacggccgcgaccgagagctggccacggagcttgttgaggacgagcgcggcaagcgcctcctggtcgacgtcctcggcaatgatgagcagcggccggcgctgctgggcggcgtactccagcgtcggcatcaggtcctggaggaccgagatcttcttctccgagagcaggatcaggggcttctcgagctcagccttctgcgatttgacgtcggtgatgaagtaaggcgagatatagccccggtcaaagcgcatgccctccgaaatctcgacctggaaacgggtgcgcctcggaggttagcagatgagcgctggaagcagcccaagaggcaagcgaagcgcacggtgtcctcgatcgtcttgccctccttgacagtgatgacaccctcgcggccaaccttctccatagcgttggcaatcagctgaccgatgtgggcgtcgccgttggccgagatagtcgcaacctgggcaatctcggccgaggtcgtgatgacacgcttgttggcctcgagcacctcgagaatcttctcgacggcccgctgggagccgcggcggaggtccatcgggttgcagcctgtgtagagggtgatcgacgtcagggcagagcctcgaaggcggagggacaggtaggggacgcaccggcagcgaccgtcttgacaccctcggcgtagatggcccgggcaaggacggtggccgtcgtcgtaccgtcaccggcagcctcgttcgtcttgctcgcaacgtcctgaacgaggctgtcaagcgaaaaaagagggagtcggggtcgtttcgatcggggtgagaggaacgatcggtcagcgggcggtgcttcgaatcacagaagagagaaggacggaccgggcaccgaggttctcaaacttatcctcgagaacgatcgccttggcgacactgacaccgtctgcgcaaaggaggaagggcgtgtgagtctctctgccttgccttgggagcagcgacgggcattctgcgcacccttggtgatcttgggtccgccgtagggctgctcgatgatgacgttgcggcctgtcgtccagggacgtcgtcagctcgcatctcttcgcgctctcagtcatgccagccatcaacaggacgcacccttcggtccgagcgtgacgctgacggcgttggcgaggatgtcgacgccccggagcatggctgcccggccctcgttggagaacttgatttccttgtgcgaggcgtaggcccgagcgaggagcggctgctgctgctggcgggcgagcggagccacgctgctgcgagcgaccgagcgcgggagagaagaaaggcgggagagcatggctagggaagggtaggaaggggtcggtggtggtcgtcgaggggtgctggaggagaaagtcgggcgctcggtcggccgtcggcgccggaagccgcgcggcggaaagtgccaggcgcgcgggcgacggcaagagtcggtcgagcgtgcaggctgcctcctgctcctgctcttctcccatcagccattctcaccatggtcagtcgccagcagtatggtcgaggcatgtcggatctcgagctgacttcccgtcgttcctcacgcttgcagtccgccacgttcaagtctgtcaagtcgctcgtcccgctcttcgaccgcgtcctcgtccagcgcttcaagcctcagacggtgcgtccctcgccggccctcctcgagaccacctcggtcgctgcctcgatgggaagggcaaggcactgatgccttcctactcctttgtttttctgcgcctggccgatcgacttgtgtactgctctcagcaaaccgcctcgggcctcttcctcccctcgacggcgacggctaacccgctgcccgaggcgaccgtcatcgccgtcggccctggcgcgcaggatgccgtacgtccctctgtcctcgttgcccggcttgaatcagagctcgaccggagtcggaccgaggtcgagctcgggcacagagtgtcgtcggctcgcgatcgagaccggaagctgacagaccctcttcttgctcgttgtccccttcaacgctgatgtctacaggccggcaagctgcagccctgctcggtcctcgctggcgaccgtgtcctcctccccggctggggcggcaactcgatcaaggtcggcgatgaggtgcgtcccctgctcgtcttcctccgtctcgcggtcgtcgaggggtgtcgaccttggccgaggtcaccgcccggccgatgagaagatcagggctgcccgctcgcaggcaggacgcttcgggccgacctctgcgctcggccgccactcagcttagcgctgcaccttgcgccagcgttcggatcggtcttgccctctgaccgacgctgactcattcgacccttgcgcttcaacaggagtatttcctcttcaaggactcggacattctcgccaagatcaacgagtaaaataacccgaaatgatggacatgcccctttgacgaatgccgcgctcaagcgagggaagctgaagaggggtcgagggaggcagtgcaccgtccgccgatagtcgggcgcacctctcggccgggtcgggtggatctgaaggttgaaactaccgcttgccatctgagcgctcggacgaacggccagtccaatcgtcgaagcctcttcagtgccttgcacctcgcgctttgtctgcagtctgctcgacccgcttcgcttctcgtcgcccgtggtcggtttgaatgcatcttcggatagtttcaaggggaaagggtgtttgacacagggtttgacgagtctttgttctgacagggggattgggagaatgcagttgatggtgcgacggcgaaacagggaggtcgaagagatgcaagggagtttgggggagagcggtcgccaagaggagaggtttagaggattgagaggcgaccggccttccatgcaaggtcgagaagggatggaggtgggaggtaggatacagggcgttgcaaaaggggagtgcatcgccgaaggtcgaaggagggccgggccttcactcggccgctttcttgcccttgaggccgccgagcatcgaccgaagggtcgagatctggcccttcagcttgaccggccgctccttctcgaccggcgccgaggtcggagccggcgaagaagggttgagtggcgtcctcgcagccaatcggccgccgctctcgccgctctggaccgaggccgatgggctgctcgagcgctcaaagccagagtactggcggggcgtgagcacgcgggccgtcgacgacgagcccgagggcgaagccgcgcccgtcgaggcgtcgcggtacttggacggctgcgggaggccaggggccgccgggtactcggctccgagcgtgattgaccggcccgagtggaccgagcgatggtcgccgccgccggtgccagccgtcgccatcatcggcgcctggacggcaatcttgggcttctcggtgatcgtgtcgaggccgacggtcggcgcgacataggcctgcttctgcttggtcgccggcttgggctgcttgaccttgggcggacgcggcggctcaaagatgtggtcggacgtcgactggatgagttgtgaagaaggagggtgtcagcgccaactcgtaacgagctccgggagcaacaagggacgcacaaattcgcccgagcgggtgaagtggttgtgccgcgggagctggtcgagctggtaggggataccatcgagctctgcaaatggcaggagaggtaagtcagaaaggaaggccctttgtcgaggctgagtaagcagaacgtacgcttgacattggtctggcgcttgggaggttgacccgcgccgctgggctgggcgccgcccgagtacatgctcgagccgcgactcgaatgctggtagctcgcgacgctgccgtcgctggccgaggtggcgtaggtgctgccgctcgcgcgcgagtagagcgagctcgccggcgaagacgccgaggctgaggtccggttgctgagcccgccaggagaagggtcgttggcccgtcggagcgaggaggcggcatcggcgtcggccgccttggccgcagactcggccgaccgccgagggacgagcactcgccgctgacccggcacaccgccggagccagcgtcgcgcgtcgtcggcacggccggcgcagagtgcgacgacccggggagcggcgtcgggagcgggagcgagggctgggtcgtctgcgtcgtccgccacgaggctgcggtgtcggagtttgaatgttgatgctggtagctggccgaggagccgtaagattgataggagctcgccgagcggtttgagttgatcgacgagtggttcgagttggtcggcgacaggcgccggatcgaggacgaggtcgacgggagctgctgctcgccattgcgctcgaccgaccgaccgcgcgtcttgtcgagcgccgcgatccgctcccgagcgagcgcgttgaggatctcgaggtcggccgcccgtcgagtcgcagacgcggaccgagattgcttctcgagagcgggcgtgctcgtgcacgagccaccggccccgccgacggttgccgacgatgaggtgctcgagagcgacgggctggcgtagtgagagccgagcgcgccgccgccaccgccgccgcggttcgggtaacctgacggggcgaggcagacgctcggccgggggttggccatggcgctgatctcgcgggccagcgtctgcgaggcgagcgcaagcgccctactcgttgtctcgcgagagccgaccccgaggctgaaggcaatctcgcccgccgccgcggctggagcgagcgcgtcgtacgccgccgggagcgggctgacggtcccgctcatcatgccgctcccgccgtcggccgccgccgctgcggcctgggcggccttgcccttgcggacgccgcgcttcttcctcttggctgaggcgatcgaggtgctccgcgagcacgactcggactcctcgttggtttcgcccccgtcggtgtcgaatccggccgactgaccaaccgcgatcgaaggctcagtgacgggggcgatgtgaaaaccctgcgtgacggtcgggggcgccgctggggcctccttgggcgagacggcgagcgggaagccgagatcgaccggtgcgtccggcgtcgtcggcgaggccgagggcgagccggtcgagggcgtcgctggcaggggagcagccggcacggccaggggcaccggcgtggcgttcgccaacttgggcgaagggaagaagccctccatcttggacgcgtgatgaggcgacatgggccgcggcgacagcaggacatgcggcgtcgagccgttagagagggcagtcgcgagcggaaccggcttggtgtcagccagctggggcgacggcgccgagttggtgagcgtcgagagcggccggctcggcgacgagggtaccgagccgccgtccgagccctcgatcgggacgagcgatcgtcgggcgaggacgggcgactttgcaaagacgaggccctcctcgagcttgccggtcggcgagccgctgtccttgcgctggacgtccttcttgccaaattggaggacgccgcccttgaaggcctgcttgccaccgatgccgccgttaaggaagacgccggggcccttgcggctcccgccgagcatcgtgatgaggctgccgacccacttgccgaattcgccagcagtgacgcggtcctcgggatcccaggcgaggacgcgctcggcaaggtacgtcgccacctcctcacccatgccggggaacttggcggcgaggaagcccttggggtcggcacggaacgactggaaaggagcgcaggtcggggccgggtcggaccaggggtttttgtggaaaagctgggttgagggacgtgaagggtcagtgaaatgggtggagagggagctgctcgttcgtgcgcaccatgttgatgaggacgatgccgagcgaccagacgtcggcgggcggcggacggtacgaagggccgaggttgttgcggcactcgaccgccatgtaggctgtggggtggtggatcaaggggtcagcgagaagtgtgggagaaagcttccgtgctcgagagcactcacgtcggctgccgcactcgacgtcctcgctctcctcgtcgcgggtcgcgaggccaaagtcggtcagcttgcagacgaccttgccgcgcgacttgcgccagctcttctcctcggtgacgatgacgttctcgggcttgatgtcgcggtggctgacaccggcgtcgtggcaggcctggacggcggcgcacatctgggcaaacatcgaggcgatgagccggacacgcgagggcgagagcagcagcggggccgggacagccgagaggagcgacggcgtcgggggcgtgtaggcggccgagacgttggtcgagtggagggtcgagtggaggaacgagtttgagggcgtgccgtgcgtcttgttctgcggcgtgatggcgagagccgacatcaggtggttcgataggtgcgagacgtgcggggccgagccgtggtgcggcgccgggttgttgtggtgcggaccgctcccggcgagcagcgagggcggcgtgttgcccatcagttggtgcatctgctgcttgaccggcgtcatcgcgaccgcgtgctggaacggcgtcgggagcttgccgtcggtcgacggcggcttcgagtgctcgagccagtagaagaggtcctcgcccgggcagagctccatcacgaggaagagccactcggacgtctggaaggtctggtagagcgtgacaatgttggggtgcgaagggattgactgatgaattgtcgcctgcgaagacgggatgaatgcgggtcagaactggaggcaaaggcaggcgtcaagcgaggagacggacctcgaacatctgcacgtcgaggctttcttcgctcagatcctgcttgctgaggcacttgagggctgcaagcagcgaagcgtcgcacctgggagatcagtctgagggggacatttaacgagcgcaatggagacgcaccaaactcgcggccgtagacgcggtggcggcgagcgccggcagcgacgtcatcgccgtcgaggccgtcaaagaggtcgtcgtccgagctcgggctgtccttgtcggcaatgacctcgcggacgagatagacgacggcgtagctgcccacgccgagcttgcggacaatctcgagcgagcggatgtcggcctcgccactggccgaggacgacgcggcctcgccgtcgacagtcccctccggtgaggccgtgttggactcggtcgagccgccaaagtgacttgccgcgggcgaccggaccgggaggagcggcgccgacgaggccgaggcgggcagcgactggtacggcgtcaggacgtcgccctcggtaaagggcgggtcgagcggtccgccgtcgctcgaggccatcgaccggcgggagcgcgactgccttcgggagctccggccaccagagctgtcgccggcagcgagggacgaccggcggctgctcgatgggctgtcgacgtcccagggccggccaaagttgccccaggtcgcaaagcggtcggccggcggggcgtcaggggcgagcaggacggccggcgggccttgctcgccctcgacgacaaccgggctggtcagcgtctgggccgcctggttggcgaggaggcccttcgcgagcgagacgctgatcggattggtccctcgccggctggcggtccgcgagcgggttgacgtcgacggaaggcgcgacggcaggccggccggcgaggcgttggacggccggggcgacgacagcgggctcgagaagccgcccgacgacggcgagggcagcgtcggcgagggcgtcgtcgatgtgagcagcgacgccatggtggctggacgccggcggcggcggcaagcgagagggttgcgtgtgcgttgcttgaaggggcggacgacgcggtcgggacggcgcacgacctctctccggtgaggcctgtgctgctacgactgttgctgctacgactgttgctgctacgactgttgctgctacgacaggaagggcgatttgaaccgagatgcgacgcggccgggactggagggcaagagtgagatcaaggggcggcgggccggccggtcgtttgatgccgtggggttggcggcctggcgggcgagaggctgactcgtctgggcgtcacgtcgctccaggcgtcggcggcgagaaaagggtgcgatggcgaggtcggaagacgggcggacgagaggccgtcttgaaccgagcgcgcacaagagagcagagggagaggggggtcgtgaaggggagagggagtggcagtttgggcagagcgagggcggtcgagctgggccgttggtcgcgccagcagcgaggtcggacctcgtggtgcccggttgagactgcgctgccaacacgatccacgacgcgagggagcccgccggcagccgcttcgacctccctctctctgcccggccacttgccattaaccaccccgcatacgacagctcccttctgctcttgcgtcgtcaagcaagatggtcctggcgcgagagagagcgggcggagcccagagggcgcgcgccggctcgacccgctcaaaagtgcatctgcatttcgcctctccctctccacgctggcctgctctcggctcgcgcaggccgacgacccaagcaacgccaccgcccatcgctcccgccggcccccggcgtgcgagagggaccagctggctatcgctcgagcacgccttctgaacgggctaacgggcctgctggctgacttgtcgctcgcctccactctatcgtcgactgctggccagtcgtcgcccggatgtccagaacgagccttggttgcgagctaatccaacgggcgagccggcggcggcgcatgtgggtcgccgcccaagctaacggttgacgtgcacttgacgacggccggtgccccaaaggcacggctgagctcaacgttggcccggctgcaggcagctgttcttttctctcgtatgaaagctcgggacagcggcgccggcgctaacgaagtcgtgacgctcatccagcacgttctccgtctcggcgtacccatctcgctcaccgttaccctcgcccgccgagcgctcgctcgagccgttcaacaaaaggcaggaagccctcgtcggccaggacgtcgccgacgagcctgcacatggcggcgtcctcgagcgctgtcggctcgcccgggccggtccatgcgccccagatcgaggtcctgtcactggcggctgtggtcgatgccgagggagggggacgaaggtcgacgagcggcatcggtgggagcgggcgcaggggcggtggaagggcgtgcgacgagggcgagagcggccggtcgaacaggcctgggtcgacttggccgctgacggcgccactctcagaggcggccggcgtgaagtcgaggtcgatcaggtcggcgacagtggccggcgagatgactggcatgggtggcgtagggccggccgctttgacgctccgttcatcgctcggcggaggggcggcagcgctcgtcgtcgtcggcaccttgacatttacaggaggctcgccaacggtcggccgagactctgcagtcatcgccgtcgtggtaccttctgtcgaggacctctgcgaccccttaaccgtcgcaggacccgctgcatgcgccggctcgctcagcttgggctgcttctctggccgcggcttgccttcgcccgctcctgtcttgcgccgcttgctcttcaccttctcggcctgcgaggccgcgacgacgacaggggcagcgacagcggtcggcgctggctcaggcggcaggacggtcgttgggatccagttgcgtacgcgctcgacaaagctatcgcactcggccggcgaggggaaggcgatctgaaagcggcggaagaggtcgggctagcggggcagggaagcgcagtgagctcgacgggatcggagcgagcagcgcgcagcggcctcgcacagacgtgctgacggtccagcggacctggagctgacagcctgtgtgcgtcttgatcagctcctcgtcaatgtgcttggatgaatctgaccgcgaccctggccactggccactgaccttggacgcgagcggccagaccgacaacccggccgtcatcctgcttgaagtgatctagatggatcgtatcctgacgtatgagatagatgctgatcagcttcaacacgctcgttgccctatcgagggcctgaagaacgcacgaggcagacctccttcccgcccgtcgcccggccttggaagacgtgcaggacggcggtggtcgcggccgacggctcgcccgtggtcccaacatcactttcttcgacgacgacccaaaggccgggcgggcgcgttctgtatgcgtgaggccggtcaggtggaagcgtcattcacagggtgactcctgatggagggcccgccaaacgccgagcctcaccgctgagactgccactttggctggcctcctttgaccggtgcctgcgcgtcggctcgtgtataggacgtcaggcaggctacaggcagggcggagcacaaggtcagccgagcacaaggtcattcgctatgtatgcttgacttgcacgaaaagctcggcatgtaagcgaggttcaatgggtgggtgtccgagggctgcgcgcatacactcgtcttgctcggccgcggcatcggcacgcagcacttcaaacaatgcacacgacgcagcagaattctttctggaaggacatgcgcatctcactcgtcctcctctgcaaaatcgccctcgtccatgtcttttggcatcttcggctcctcgtcctcgccgtattgcatcgcgttgtcgagatgcgacaggatcgtgttgaccgagtcgggattcgacgtgtcgagcgggaggaacgagacgagattgtggtcctcgatctggaagggaggcagatgaagtcagctttgattcggagagggagaagcgcaggagggacgcaccagggagacgatcgcctgattcagggcggcaaatctcgggtttgtcgagccgtttgcctcgtcctgtagcagcgacggatccggatcgagataactgaggttcggaggggggctggtcagtcgatgcgtacacgagtggcttcgggttgagggggacggcacgcaccggccgacttcgctctttgccttacgcccgcggacgaggtccatcttgctcagcaggttgacgcagctgacctcgaggctgaccatgcagctcagggcgctcatcgtgccggcaaagaacttgctcttgtcctccatgaactggctctcgagcaggtaggccgagcagagccggaagtctgacttcttctggaggtgcgagacgagccggggcaggagcgggatgtgcgtgtagagctcgatctggccggggcagtcgatgatgaggtagtcgtcctcgtacgagccgagttgctcatccagccagtcgaggttgtcgaggaggtacctggccggtccggacagcagcatcggccgtgtcagcgcgagtcgacctgaaggtctcggtcagagtgatgacctcactcgaagcagtacatcaacccgccgttcggcccaaactccatttcctccatgacgtcctcgagcgagatgaggtcgcgaatgtcgattgtcggcgggtactcgaacgaggtcgcggccgggtcaaggttgaacagatgaatctgcctgttgagcgactgggcgtgggcaatgatggacgcgcagaaggtcgacttgccagagccggccgggcctggacagaccgcgaggcacggcaggtcagctttgcgactggtcggtcagcccggatgaggccggcccagggaggggtggacgaggcgcagcgccagatcgcgggcgagagaggcgacggaccggtgacgaggatggcgtagcgcatggcgggtctagctgagagagagcgcacaagctgttacaagcgtgcgagggataccgtctgctgccggtcttgaagggtctgggagaggagagagggcacgagggcgggatggctgactgacaggagagctcgtcgggtcagcggcctgcgcctcgcctcgcgcgaacctgctaaccctaggtcgaaggaggagggccgtcactgctcgacctcctcctaccctgctgcccgaaccctcctcctcccctcctcccctcttatccctactacttcagcaacagctcgagctgccagcaaccggttcgatccgtccatgtcgaaaccgaaacctactctgccgatgtcaatcgccggcaaggcgcctcccgcggccgcgcccgtcccagccccgcgaggcccgaatcggtgcgcatcctcgacgccgccgagtactcctcggtcatgcgacaggctgagctgacttgatctcctcttactcagttcgacaaaggcctcgcagaagctgaaggtcagcagccatcctgggccgcccgctacagggccgacgctgagccatgacgcttgccttccctccacttgccgcaggtcctgcccgacgagccggagccggtcccgacacagtcgaaagcactcaaggccgagaaggcggtcggtgaggaggacgacagtgatgacgacgacgatgagcccgaggaagaggaagaggaggacgtccaggtgcgtcggcttctcgctgggcggccgagactgccaagcgcagccagcgcgcgctcgcccgactgacgagtccctacctttctcctgaacaggtctacaagcagcttgcgcagatcccggctggttcggcgcgtcgagatgccatgcggctgacgcggaaggagaaggcgcgcctgccccgtgtgacggcgtactgcaccgcgacgtgagcgcagcttccccttccttcagccggtcgacaagctggctgacccccgttgcccgatcctcagctcgtatcgtctcgcaggtgtcttcgaccacctaaaggcccgccaggcctcgcacctgacgtcgcccgttaagtttgacgaggtcatctacacgccctactcgctcccgctcccgccgtcgccgtcgccgacaccgtcgcctggcggaggcggccattcgtcgaacggctttggcgggtccaactcgcgaggcggctccaacctgaatcctgcccggcacctcgtcggcaagctcgtcgacatcatcgaggagaacaacgtggcagctgagacgacggccgacggtaccgctgtcgccggcgtcgacggcggcgcgggcgaggtcaagccgaagaaggtccgcaagccgcgctttgcaatcgagtcggagcagttggccgacgatgccctctcgcccttctcgaacgagcactcgctcctcggcaacggccacgcccagccgagcggcgtcaagcgcacgaaagccgaggtcttcatctttgactatggcgtctgcgtcatctggggcatgaccgaggagcaggagcgccgcttcctgagctcgctgaggaaacacgagatcgagcggctggcgaccgacgacattgaggtcgaggacctcgtctactattacgcttcgtactcccggttggtctcgcgctttcacctcgtggtcggcgtgcgtcttgactgacgagcctgctttccatccgccagagtctttaacgacgttatcgcgctcaagaagggctcgtcctacatgtgagttgggcgtggcttgatccagcgctccctgttcctgcactgacccgtgcttcacacctgctcaggaccaagctctcgctgtcgcacgcgctcgcgcagtctgtcaagctctcattcttcgaggccgccgttggaacgacgatcgaccagaccaagggtattccacaggacatcattgagtcgggcaagattcaggtgcggacgctctgctcttctctcagtgagatcagtcctaacacgtatccttgacgcccgcagatgccgcgtaaggagattatgcgacagatcggccgactcttcctcttgcgggtcaacatttcgctcgttggctccatgattgactcaccggtgcgtccgacttgacacgatcgcctcactcctccactcgggtgctgacaaccgcaatcctctgcaggagctcttctggacgttccccgatctcgagccgttgtacggcgccttcaagacgtacctcgagatcccgcaacggctcaacgtcatcactggccgggtcgacgtcctgcaagacatgcttcggctgctcaaggtgtggcccctctcatagctgaccgtctctaatttacgctcccactgacatcgacatgcaacgcctgcgacaggaatctgtcaactcggcccacggagaaggcctcgagctcatcgtcgtctggctcattgtcctcgagattgtgctcggagtcgtacgtcctggttctgcgctgcccgctcctgtcttggcgctgaccgctgctctgaacaccttcgcccgcagatcacggtttgtccctgtcaaatcagagtttgagccccttgaactcgtcctgaccttcatcctgcgctcttccttcttgcagatcatggtcgatctcttcgcctaaagctgctctctatctcacgacccccattcccggaccaccttttgacgacccccttggccttcctctcgcggacggacctgccccctgcctgcgatagatgcgactctatgatataccgctgcctcattcgcctctcgctgagactcgacagggatcagtgcgcgtctgatcgagactgggcggcgagatcaagacattgcatgatgctgcgggcgccgtcgccgccgctgacggtcgctccgctggtgcggcgcagaccctgccgactgtccttccgactcccatccaccatctcctcttgccctccctcttcttcgaccgcgcgcgtacatgtccgctcctcaaaccgttccctgtcaggtccgtctccaatcgctcaggaaccaggcgtgggatgggctagctcacgcgaggcatccggcggggagctcgaccttggcctgcgagctcgcccgtgcttggctcgcgacgccttggctgccatcaatcactctgacgcccctttgctggcactcccgcagtacaagaccggccgcacgcttggcagcgggacgtacgccgtcgtcaaggaggccgtccacatcggcaccggcaaggtcagcctcgaccgagctcgtcggcagccccgtcgcaggatgctcaccgactgactctccttccctcgtcgctcttgcgaactccagtactatgcttgcaaggtcagtcgtgcgctcgtccgttgctggagattgcagctgaccttcgtttctccctggacttgccagataatctccaagaaggtgcggttctcacctttgctgcggcgccgctgctctccccgtcactcatcgccctttcggcgcagccgcccacgctgaccgtcctcgcgtgtccatctgtagctgatggaaggccgcgagcacatggtgcgctcgttctgctgtgattctcaatctggtcttcccggctgattctctcttgcccctcttcgtcaggtccggaacgagattgaggtcctgaagaaggtctcgcaaggccacccaaacgtacgtccggcgatggccgtgtcagccgacgttctacctgaagcatgctgacaacctgcactcgcgtctttctgacgatagatcgttggcctcgtcgactacttcgaaacgaggagcaacctgtacctcgtcttcgacctgtgcaccggcggcgagctctttgaccgcatatgcgcgaagggctcctactatgagcggtgcgtcgggctgacgatatgatgcgagaaggtctggatcgagctgacggtgttcctccttgaccacacagggacgcggcgcacctcgtctacgtcgtcacgtcggccgtccgctacctgcatgacctcggcatcgtgcaccggggtgcgttgtcgcgtcagccgcttcacctcttccatcgcatcactgatggtttggtcaacgctgcagatctgaagcccgagaacctgatcttcgccgataagacggatgatgccgcgctgctgatcgccgacttcggtcggtttctcccttcacccgagccacaagcgtcgaagagcagagcactgacatcgttgcgaccctcaggactgtcacgaattatccaggaggaccagttcaagctgctgacgacgacgtgcggcacgcccggctacatggcgcccgagattttccgcaagagtgggcacggcaagccagtcgacttgtgggcgatcggcgtcatctcctagtcagtcgacgaccggcttgctaagatgacctgatcgagactgaccgcccgtgctttcgcgtctgcagcttcctcctctgtggctacacgccgttcgacaaggacagccaagcgtgcatcccatttccctcctgacgtcgacgacagctcgtagccttcttgctgacgaccggctcaatgttcacagcgaggagatgcaggcaatcatccggggcgcctaccgcttcgagccgaaggagtactggagcaacgtctcggacgtcgcaaaggactttgtctcgcgctgcctgacggtcgaccccgcgcagcggatcacggccgagcaggcgctcgcccatccgtggctgtcgcaggaggccaagaagagctcggccgctgccgaggttgacgtgcgtttccccttgccactaattgagtcgctcctcaatcgtcgatgcctgctgatactcttctgccggcctgtttgcactgctcggatcaaaagctgctccccaacgtcaagacgaacgtcaacagcaagcgtacgcgtcagtttcttccttcatggatttgccggatgacgaactgatgctgattctgttcttcctctctctcgcttacagtcaagagcacggtcaagggcatgatcttcgcgcagcggctccgcaaccaggcgctcgagccgcaggacccggccgaggccaagcttcaggccgaggtcgagggttacaagaaggtcggtcgtcgctctgacgcaggtcggctttgtgacggcccggctgacgcccagttttcacaccgccctggcaggctgcagaggaggagaacccgacgcaggtcctttctcaaagctagagcccttttcccgtcgcggtcgccccccatcggcaatcgtccatcttgtgcgaccgtccacttcacgcggccgctgcacgcgcacctccagcctcgcccggtcgccctgctctggatgatcatcccctagtttgtgtcgcgtgctcgcccctccgtgtgctcgtgcgagcaggacccctctcttcgttgagggcaggctgaggtcgtgacagtgagagggacgttgcaaggtcattgcatgctcgtgtgtgtaagggcagggtatggtaacaagtggagggttgatgcgatgagggtgctatgctgcagtgatgtcaacgagggtggtcgatgagcgatgaggctcaggatgaccgccggccggtcaatgaccagtaaggctacgagataggtgggaatggcggcgacgggcgttcttttttgtagagttacaagtgagagggggggggggggggggcaggggggggaggcttcaacctcgtcccctccctcctcctcagtccactcatccacctcttcacctccctccacgacttgctctcccaccttcatcgcccatcttcaaacagcctcaccaccgcgcggcgaggaagagtctcgcacgacctcctgcgtgaggcgatcgactgctgggcctggcgcgcagtcgcgttcacgctccggcttgacgtcctcgaatgggtgtcgaggacggccggggcggcggaacgggagggggcggttcggctcgagtaagagcaaaggtcgtcatgattagatggggggtcggtcgtcaagagatctggaaagatgaggtcaggggaagggcaagaagtgtccagaggggaggagagggggtatcgaatggcgctactaacgcgggagaaagtagtgggacgacggacgacggggcgggcttacttgcgctcccaggcgctgatgagcttgttgacgggcgcccgaccgcggttgctcgctttgacgtcctcgccaaagaccttcttcttttcggcaccgccgccgccgacgacaggctcggtgtcggcctcccccccggttgctgtagcggaagaggcagagagcaccgagccgacgcttcgtgccctccggcgagtgggcgagtcgacggccgctgctgctgctgccgacggcagctcggcggccgtcgtcgaggtcgacagaggcgctggcgagggagcgttgcgcgacttgacgaagagggggcgggtcgacgtcggggctgcggtctgggcgcgacggccaggcgggaagggcgcagaggggaggggcgtcgagtgtgactgctgctgcggctgctgctgctctagggaaggcaagatgtcggcgaccgaggagggcgagcttgcgacgacgggcgagtctgcccgcgaggcgaggagcgcagtgtagcgcttccggggcgggacgggcgagcctcctggcgaagaggggcttgcccggccgccgctcgacgccgacgccgccgatggggcctcgaggttggctgtagaaggcgatttgctgacggcgaggggcgtcgtgtcgactgggaagacgcctgcggcaaggctcggtgatggcgtcttgagcaagcgggtgtgcgaggacgttatggatgaggcggacgacgacgacaggaggcctggtagcaccgactcgggctcatccgtcatcgatcgcggctcctcgtgcagctcacgacggtgcggctgctcgacgaggcccataccaagcccgaagccgtcgcgctcccggcgcgagacgtcctcgatctcgccctcgagcgcctggaagccttcggccatcgcgagcctcaactcgcgcatctccttcctgacctgaccgaccgcaacctcgcgcccgccctcgagcgccgcgacgcgcccttcaagctcggccatccgcgccgagagcgtccggagatgggtgaccgagtagacctcgagcttctcgaacttgcgcgcgaggaggacgagcgaggcagggacgtcgagtgcctccgggtcggacgcgtgcgggaggaggtaggccgacttttgggcgggcagctcgggtaggctgctcgtctgcgatacggcccgggcgagagcggtcgacgatgcgggcgctggagcggccgaaggagccgctggccgtgcagcgaccgcccctggcggcgtcgacgaggcgtcaaagtacgagttggcccgagcggcgaccgccttctgcaggagcgacaggtaggacaagggatcagcagattgaaagcaataggagcagcggatgagattgcgaagctcactcgaggcgtccgctcctctgcctcgggcgtcgccaccgtcgaccgcttgcccgctgcgagccgttggttctcgagcgccatcagtcgctcggcctcgcgccggctccagtcgcgctcctccctggccaaacgctcaatctcgtcgccgctcagcccacgctcgtccggctgatcccagtaagtcgaagcgggctggccgaccgacttggagtagccgtggccgggccggccgacaggggcaggaggcgcgagcgggggctcagccgtgccaaacgacggcggcgggaccgggctggcgcctcggcccatcatctgagcgaacttggtcgcgagacccttgagcggcgggccgggcgactcgggcggtgagtattggctgccgctggttgcagagggcgaggcgaggggcgagtgctggacgaccgggagctggagcgggaagaggtcgggcgcggggaagtcggggaacgaccgcggccggtcgtcgtatgtcggcgtcggcaggtcaagtggcgctggtggagggcggtaccagctgttggacattggatgctaaagggggggggggtgaaatgaggtaagggtgggtgtgaagggaggaaggaggaggtcggcggtcgctcaacctcctcctctcgtctctggcgctgcgcgacttctctcgacgcgtcgcgaggcaggaaaagcaggcgcgcgtcaccagtttggtccgcccccttgcgagcgagagcgaagcgaaatgggtcatgatcgtagcgcgcgcataggcataggtcgcacagaggggacggcgagagagagagaaagtttccagaaggaggggccgctactcctcgtcggccgagatctttgccttctccttgagcacgagcggctcgcccatgacgcgctcccagacgtccttgacgtcgtcaacgacctgcaagagccagagtcggtcagtctcgcgagcacaaagttgggctcgtggaaggcgacagagcgcaccgtctcaaagtgcgacgttgcgtcgtagctcttggtgatgaagatgccgtcggccttgccgtcgctcgtcggcgcgtactgcggcgtgatcgagatgaacctggaaagagaggagatgacatgcaagtcagcgagtacgcaaacgtgcgacgcttgccaggccagtcggacacacttctcgaggatcgggccgagcagctggagtcccggcgcgatctcgcgttcggggaccgacgtctcgcagatggtgctgacgatcgcgaccgtgtagcccttctcgcagacgttgtgcgtcgacgagaccgaggcaatgtagatgtctgcgagaagggaagagggctgtcagcgccgggggatggcgactgcgggtaaggccggacacagaccgttccgccggttgacctggttctgggggatgacgatctgaaccgagtccgactcgtcggtgcccggaatgttgtgcttgaggaggcagatggcccggacgactttgccaatctcgacgacgcgctgcttgccctccttctcctggccggcgccaaagtagtctgggctgccaatgacgatcggcgccttgaccgtttcgcccgcactcgtgacgccgacaaacttgccggtcgtctcgtccgtgaccacctccgagatgggcttgtcgagcatgtaggtcccgccgtggatggccgagagccgggcaaacgcctgcgggagctcgccgagcccgtagagcgggtagatgtagggcgacttgccgtaccgggccatcgacgacgtgtagagcatgatgcgctcgtacgtcggccgcgccggcttggtgatgtagctggaaggagaggcgtcgctcggtcagcaccacccatcctgctgctgcgctcgtgcgagagcccggacccactcgtcgtcaaggtagagggccatcgcgtggccgataaagtcctgcgtgccgagctcgaggccgaacttggtgtagattgacttcatcgagtccttgtcgaggttgacgcctgtggaggcaggttgggcggtcagcgagctggtacagaaccttgtagttcgctaggggaggggggaggagctgaccctggtgagtcgtcgggtcgtcatccctccagttttggatgaactcaaagaactttttggcccggcgcttctcaaagaggcccatgagcgagctccggacggcctccatctcggtcgacggcactttggcgatccggccgtcgcggtagacgaacgaggccgagatctgcttgaactcgagatagcggaggacgtcggtccggacgagaatcttgacgagctcgcccgaggcaatgatgaatttgggcacgaggtcgaccgcccacgagcggtccttgccgtactcggccggcggcgtcgtgccgggccggaagtgctcgtacgtctggtcgccgggcagggacaggggcagcggtcagcgaaagggtcgacggatgctgcctgctccgcgcacagatgcacctgggtctgaggaagcgacggtccgaaaggaggcaccgggaggtcagtcagcatcggcggtcacggtcgggcggggggagcagcggcccctgagacgaacgaggttgagcgaggcgctctcgccgccgtagtactggttgcggtccatgtggaggaccttcttgccggcgaccgagagaagacccgaaaggatgcactcggtcaggccggtgccgaggacgatgacctgtcgtcggcgaagggaatcaagaggagtgggtgatcaccgggtgcgaggcgaggtcgggtgggagcgggaggggtgggggtgagacgtggcagggagtcagtatccggcctctcgcggacacgtctcgcttgctggcaggcacgcacatcgtactcttcgtccattcttgttgggctgctggacggtctgggttgaggtgaggtggcgtaagggagcaagatgtggttcggagggaggccgccgtcatctcagcccgctcgagtcgagctccgagcgcgctcctcgggccgacctacgacgtcgacacccggctcacctcttcgccttgattcatcgcttcgagagccacaaggaccttatagagacactcgaatggacgccgagatgctcccgatccagcctgacccgcaacccgaacacgagcgtgcctcggacgatgacgtcagctcctctaacgggggctcgagcgctgcggaccatgtcgcggccgatggccaggacagcgacggcagcgacggcgactcgtatggcgactcggacgactacatctcagagtccgacagcgacaactacccgagcggcgaagagaacagccacggcggctgggacggttgggacgaagacgacgacgacgacgacggcgatgcgaggtcgacgtactctgtcgaagcgccgggcaacatctactcctcgtccgcctactcgggcgaggcagatgacgaagaagagtgcgtggatcctccggctcaagcgttgctagctttgctgatgacttgtcagctcgcagagccgagcgaaagaagatccggcggcggaacgctgccgccgccacccctacccctttgatcgacctccccttgcgactggtgccgccgacggaaatccagctcctcattctcgaacttgcggccagtagcgaccaacgctcgagagacgagaacgggcgttggatctggcttttggcccgccgcggtacgtctcctgccgcacgtcacggcctcaggaagcgacaggggtcgcgctgaccttgagtgcggcctcccctcctctccagtctcgcggacgtaccgcgactttgtcgaacgtcaagcccagtcaaagtggctctgcaagtcgcgggcgacggtcatggctgtagtcgtacgtcgcgatgtttgggcgaggcagtcaatgcccgatccgcgctgactctcccgatcgtgcgctctgctgcttccgctcctcgcagaagcttcgcggcaccattgagcggtgcatggagctcgaatttgactcgtgcgacgactcggtcgtcaccttccggccgccgacgatgcgagagaccgagcgggcgttcgttgccgagaagctgaagggccttcagaacgacaaacggctttactttcagctcgggtcggactatccaggtaaagaggtcctagttgggggtttccaaagtgtgagcgagatcttgtcggatcgagctcaaaccttgcccactggaagcagacgacggcacccggtcctgaatctgctgcctaaccgaggggtcaatcaggcggttcgggtggaatcgaccgggggaggtgggtgacgcctgcggaggcgggcccgcggggggttgagcaaaacgtcgtccgacagcagcgagaccggtaccgcttgatagctctcgacgatgcgacttcagatcaagacggtcatccgatcaaaggatgatcggccagctttgggggggggaatgcgcgtgggtcccggggcgcaggtcgctgggctgctgcgccagcccgcttcagcttgtcgccccccttcgctgcctgtcgacgaccaccaacgatcccgagagcagcaagcgtgtcaatagggtcagccctgtccctgctgtcgtgggccgtcgtcggggcgggcagggaaacgggaccgccggcgctgacctgtttccccctccgcccgcacctccgattatctggcacactcgtcctgagaaagcgttcactgaccttgactgactagaccaggccgacatcagcagcggctgacctctggatagagtccagcggcatcgtctgcggtttgcccgcccgcttgtcggtgcacgctcttcgcgtacgtctccgtagccctcaaccgcgccgaagggcacgcaattgattgaaatgcgcttgccgaccttcgcactccagatccctggcaagcgcgtgtcggacgacctccatctcgtcgtcccttggcggcctctcttaacgctgctcttcgaggaggaggactacgtcgtcaaggtgattgacgccaaaagccgaagcatgatggaaaccatcaaggcgaccgagatttcgggcgcgtttcccgacttcgacgtggtcaataagttcatcgccatcgggctccgggcgtaaatcgaccggcgcaaacagcagcgaggcttccgcaagaaccaagccgccaagaagggcttctcgatcgacaaactgatggacgaggaccgcgactcggctcacaacaacccccagcacaccgttcggtggtaaggggtcactcgcgtcagtagtcactcgcacgtattcgatgggatcttgaacctcgataagagtcgcttgctgctttctgctcagtaggacgatctctagtgcaacgagcggagggggggcggcgccgagtcgattgtcaagagggctgctgcgcagacgctcctctcgccttgctctgtttctcgctcttcgccgccttaccctcaccactcgtcccgacttgatgaaccgctgggctcaccagcagcgccaagcagacacccccgcaatcgtcgagcgactcgccgctgccgctctgggcgaagaggtcgcctgggactctgacgacgtcgagtcggcgacgagcacgcagcacccgggcgagagcttcttcgagcagttctccgaagacatggagctcgaccaggaggacgaggagcctttcgtgaacgaggtccgagatgtttcgcaccacagtgctcgaccgccgttggccgaactcgagctcggcctttcgggcgacggcggtcgccggacgtacgtctctcctgctcgtcctcaatctcgaccagccgttgatccgtcctgcgcccccactcccctttgaccagtttcgtccccttcctggagcagccgctcgaagtcattcctgctcgcctcaacctgccggtcgagcttcagctcgtcattctacgccaagtgactaaggtcggccacagctcacgctctgccatgcagctctggctctggcactcggcacgtcgaggtccgtccggccgctcgctcgcgagcttcatctcatgatgcctcagctgacatctctctgctccagtctgccgctcgtggcgcgagttcatcgagtgcgaggcacgcaacgtctggatccccgaggccagggtggttgtcgacctcgcctttgtgagcagctgtcgttcacgcccatcgtctcgaccgcgagctgacgtgcctgtcgaaatcgcagggctgcccgggcgacgatctcgcgctcaagttccgctcgaacgagagcgagatggccttcttcgaacctcgagacgagctgatcgggaccaacctgctcgacgagcaagaggccctcttcgaaagcggccgagacatcatctttcagctcgacgaggccgagctcgatcctcaagggcgctctttcgtcctctgactagcaccttgcgccgtttgactgacgacgtctcgcgtcaggtgaccggcatggtgctcgcaaggccgtatctcatcggcgctccctggaaggccctcgtctcgcagctcttgtccgaggaggctcaggtccgtcgagtcctcgagaccgagagtttcatcctcggggccgacaccatccgcggccctggcccgactgacgagctgctcgtgcgcaagacctacgtccggatgcgctacgattgacgaggagaggcctacaccatgtgggcgctcgaccacccgtaccacgaagagccggacggcgtcgacgtcttactccaggagctgcgagagtacgcagcccgcgctcatgtcggtccttcgtgatgcttgcgatgaagatgaacccagcccttcatttctgacttgaacaggcgcccctctgaagtttaagtgtgacagtcatcaaacatggatatcagcaacgccctccttcgacagcgcgtactcagagcagcttcttgatctcaggctcgaggtcgtcctatccgccagaaagtgggggactgtcagccgctgcgctgggcgagggagtcgaggacaggaacgacgcacgaccgacgtcgtctttgcagcaaagtacttgacggccttgccctcgcggtcaaaaaggaactttgcaaagttccagtcaatctcggggacgtcgagcgtggccttggcgtgcttgaagatgtcgttggtctcggggccgttgacgtccgacttgcgggcgagcgggaaggtgacgccgtacgtggccgagcagaaggtggcgatctcgtcgtcgtttcctgcagcacggtgaagcaggtaggtcagccggctatcccggcgataaggggagcagtcgaggaagagagagagacgggcagaggcggctggtcgctgaaggttcggcgatggccgccatcttcagcccgaccctccgaacaggcgcactcgacgactctccaagcccgcaagcccattttgaaaaagagagcagagagcgatggcagcagtccgacttaccaggctcctgctgcttgaactggttcgacgggaagccgacgatcgcgagacccttcgactcgtaagcctcgtgcagcgcctggagctgcttgtactggggcgtcaggccgcactgcgaagcgacgttgacgatcaggacgaccttgcccttgagcgagctaaagtcgagcgtgcccgagcggaggggcgtgctcttgagttgcagaagcagaggtgaagggtcgagccggatgcaagatggcgacaggcaggccggggaggggctgtcagtggagcaggtcttgacgcaggttgggcgcatgggaccgacgcgagcgagctacttacgaggttgtagagggaggtcgacatggctaatataaagcgggttgaatggaggctggatggatcggcgagtggtggttgacaggtcgggctcgccatctcgcgctgcttccgtcttctcgtcggttgacgccggctcggacgtgcgggcgccggcacatctggcccaacttcttcgctgtcgactggagtggtcaatgtggagaggtcctggcgcctgacgacgtgcgcgctcgcagacggtccgccgacagagttcacagcgaggaggcatggagggcaattgggccggggaaggcataggatcaagagggtggcaggatgaggacggtcgtaagaggtcgtgagagtcgtcaaagtcaaagggagatgcccgcctagagtccggcagcctggcgagcctcgagcgcctgctttgtgcgccagcagcagaaacaacattgtcagccccttcgctccgatcgcaagcgtcacgtccgcacgcaggccgactgacccgctggtacgtgaggctgctcgacgagaagagcctatcggcctcggtcgcctcatacttcttcttgtgcgcgccgcccgtcgtcggcggcttcaggtagccgtcaaagtcctacagcgcgtgattcgggaagaccagcggcgcagacgtcagcgagcgttcctgcgtggctgggtagggaacccgtcggcccggagacgggaggctgaccttgacgatgttgccgccggtctgactcgattcttcgaggtacgagccttcaaacgcccagatcttggcctcgaggtcggcctgggacggttgggtggtcagctatagcgccgatcgagcgtagaggcaggagaccgggacagaccaaggccttgtcgaccttgcgtttcttctggagggccgtctgttgttcagaacagatgggtcgatcagcccgtcagcaccccgagattgagcgcaccacgttccgtcgagcggcgcaccaccagagcctgcttcgccgcctcgttcgctgcgcgtccgtccgctgagatcgagtcgagctcactgtcagcgacaggttcagaccgagcagccatcaaggggagatcaacgcacccgggttgacctgagacgtctgctgaccgccggccgggccctgctgttgcggcgggccctgtgccatcggctggccggcggccttctgctgctgttgctgctgctgctgctgctgctggcctggcgccgaattgggctgctgctgctgtggcgggggctgcggcggagcctgctgctgtgcctgaggcggcttgacctgctgtgcctgctgctgctgctgagcaggctgctgctgctgctgctgctggttctgctggttctgcatggcgagagggtgggtgtcgggaggtggccggacgagccgggacgcgttgggcggggagtgcgcctcccaattcaagtatcgacttagacgaccagcgattagataacgggagacgacgcctcgggctggcagcaggcggttggggtggctgggcggagaggtgccgccatcgcctctagcccagcagaaggaggacgagtcaagaggagcgacagacgacgacgtgacgaccctgcccactgcactcgaaagcaaccatccccgcatacgccttcctttacagcccacgaccttccagcctcgcctcccgccgaccaggtcttttcgcgatcgccccaagccgacacacgcgtgctgctcgactgccctcggaccgccagcctccatccagccccctctcgcgatggccaagtttgccgtcctcgtctactcgggcccgggccactcggcctcgtccgtctatcacacgatcaagacgctgcggacgctgctccagccttactacattgtcagcgagctcgcgccggcccagctcctgaacgagccctggcccaacacctgtgcgctgctcgtcatccccggcgggcgcgacatgccctaccaggacgcgctcggcggcaagggcaacgcccgcatccgggcctttgtcgaggctggggggggctacctcggcatctgcgccggcgggtactatggcgcggccgaggtccgcttcatgctcgaggacccggtctacaaggtccatgcgacgcgtgagctcgccttctggccgggcccgtgcgaggggctcgtcttcccaggcttccgctaccagagcgaggagggctcgcggccggtcgagctcgcactcgcgctcgacgagctcgatgcgctcggtgcgatggacagcacggcgcacggctcgctcgagagtccggcccagcacatctactacaacggcggcggcgccttcttgcctgcagctgagggagggaagctgccggcgacggcgagggtcctcgcgcgctactcgcaagcggccggcgctccggccgccgccgtcttcaacgaggtcggcaagggccgagcggtcctcgtcggtgcccacccagagtactcgctgctcgacgagccgctccaggcctcgctcaagcgccactacgacgcgagcgagatgccagacgcggacgccctccgcaaggccgaggctaaccgccttgagctgatgcgcgtcctgctccgcgcgctcgacgtcgtcctcccggaccagcaggcgctcgacctcgagctgctccagaggccgatcaggccgctccctcagatcctcgtcgcccacccctctcagcctggcgcgctcaaggtcatcgaggccgcactcgagccgcactttacggctccttcggcgaccgatgacgcctcagcggcgcctgggcctcgcgtgctcaaagacgcgaacgacacgttctactatcaccaggcgagcgacctcccttccgccgccgactttttcgcccagcagcggacgacggcgctgtcggctgccgaagaggaggacctttcggtcgtcccaaaacacgtcatcgtcgcgccgcgcgaggatgccctcgcgaccatcgcggccgagggctggtgcccgctctgggattgggcgagcttctgggctgcgctcgacgagcagcgcgtcaaagtcggcggcgatcggcggacgcttggcgagggagagaagtggcggtatggcgacgttatctattactcggaggccgttagctcgacccagacgatgctcgagaagtgcgtatacagtgcttccgcttgagtcgcttcgctgacaagctctcgtcacgcagaaactcgctcctcatcatgtcgcttccgacgccgctcatctcgctcgccaactaccagctcgccggccgcggccggacgtcgaaccagtggcttaacccgaccggctgcctccaggcctcgactcactttaccatcccgacggcgatggcccagaaggtcgtctttgtccagtacctgcacgcgctcgcaatcgtccaggcgcttgacccggcaccgccgggctcggaccgcgacattggcccgctcgggatgtgcatcaagtggccaaacgacatttacgcggtcgtcaagtcgaccggcgctgacggcaagccagtcgaggagaagctcaagatgggcggcgtcctcgtcaactcaaactattcgcgcggcgcgtttaagatcacgtcgggttcgtacagggcgcgatcagtggcgtctcgagatcactggggctgacccttttctctctcaggcgccggcgtcaacatcctgaaccgtctgccgacgacggcgctcgtcaagctcgtcgaggcctacaacgctagtcttcccgaagtcgccgagccccggccgctgccgacgatggagacggcgctcgcggccatcaccgcccgcttcgagcagatgctcaaagtctttcttgaggcgccgagcggcggctttgagcctttcatccgcgactacgaggaccgctggcttcactcgtgcgtgccgtcctctgcggccggattaattcccgaggctgaccgcctgtcgtctcgttgccccgctcggcagcgaccagctcgtccacctccagtcaaccgacccgccgacggccgtccgcatctcgaccatcacgctcgactacggcctcctgcggacggtgcccgtcaagggtgcggccgcttacggcggcggagagtacgacggcttccggacggccgccaaggcgtaccgcgagccagagtttatcgacctccagccggacggcaactcgtttgacatcatggccaacatgatccggcgcaaaaattagcgacctcttggatggccccagcgttgtatagcagacgatccaggtgcgaggagggctcatcagatctgaggaaaacccttgctcttatgccttgagcttggcagcgtggaccgcgtactccttgttgacaaggtggctcgtggcctcgatcagcttgagcatcttctcgacgtcgccgctccagccgttgagtacctcgtccgaccccttcttctttgtgaagtcgacgacgcccgccggccggtcgatccgcgcaaagacagtcttgtcgacgacgagcgtcgcgagcgtcgtctctgtttccggcaacggcaggtcgagcagggctgccagccgagtcagggtgatgcgcgtgtagtagccggcgaccgtgcggatgttctgccggacgcgaccgagacgtcagtccaaggtccaggcgcagccgtcctcattcggccagaccgcgactcacgtgctcgatcacccgcttgtgcagctcctcccaccggaactggcccttctttgacgggtcaaacacgctcgattggcgcagcgtcggcccgtacaagctctcgatcgccggccaccgcttcagctcgggcgtcgtgaacgacttcagcaggtcgctgcgattggaaggaggtctcttcttagcgtgtgaggggttgcctgaggaaggccgaaggggagacgcactggtgcagcggaaccttcttcattgccgggtcggcatcgagcttgaagagcatgtccgactgctcattatcgtacttggcgaggacgacgtagctcgcaatcatctcgagagcctacacaaagcggaaggtcagcgtcgaagccgacagcgaacattgcgagtgcggcgcacctcctgcgacttggcctcgtcagccttgatctcaggcgtgtcgtagacctcctggtacgatttgcacgcgtctaggaaggcgtcctcctcgagcgcgagcgaaatgacgagcgagtagtagcgcagcttcatgtcctgtgagagggcgcagagcgtcgttagcgcgcgtcccgacacacgccaggactcggaagcacacgcacggcgttgccctcctccttgaggtaggcccggttgatcttgcggctaccgacgcggactcgagtccagttgtcacggccgctctcgagccgcatctggtcgaggatgctgtgaaaggatggaagttgcgcagtcgcacacaacccggtcagcatgcgaggcagcacgagggtcgaacgaggactcggaacgcacaattcggtcttctcgcgcttgtccatgctgctaaacgtctcgacctggaggtcgctcaggaggtcggctgcccgctcgaggtggtccttcgagtagatcggctccggctcttcctccttctcgcccgccgcggcgcccttggccttggtcgtctttttcggcggtgctgaaggccagagtgtgtcgagcggctggtcagcaaggtcgaagccactgagacaggtaggacgcagacgcaccatctgctggcggaggaggcgccgtctcggcctgcttctcgtggtatctcgacaggaggaccgtcaggcgcgcgcgctgcagctcgaggtagatctggcagcaaggcagggcagtcggtcagcgctccggactgattgtcgctcgagctcatcaacgtcgacggaccttgccctccgtgatgcctcggagcgacttgagcgcatcgagccagacagcctcgcccgccttctccttgatctcgggcaagaacgtgatgacctcgtcgatcatccggacgacggcctccttgagctggccgtgccgcttggcgaggacgatgacggtcgcattgagggaggggtagttgccggccttaagggcgagctttgcggcggtcgtgaggatcgtcgaggttgacgagagatcggcggcctacagtcgagcggtgtggcaaggaggagcagcaggatggagttcaggctgcgagctcacgatccgccatcgcccttgcagctctcgtcgggacgtacgttgcgggtctgcttctcgagcgcgagcagcttgtcgagcgcatcctggagctggccgctctgcgagagttacagaggcaagaccgagctcgtcagcagtcgtccgggcttgagagatgtctgtcgaccgcgcgagggtgggcgcacctcggcgagccgggtcacttccggcacgagctcagccacctccttcgtgaagtcgcgctcctgcttgcgaggcgcaaatccggacatgctgggctagggtttagagaatgagaagggaggaggaagagggcaggcgggggtcgatgtcggcaggaagcaaggccctccctcctccacgtctctcgagcctgcgcgcgtctccaacacccgtcaccgctagctgcctggcaggccatgccctagccgcctcagggaccctctcacgttcaagcgccagaccagcctgcgctcgtcctgctgcagacaactcgctgccgtcgcgacctagcggagacggccggatgaggagtcgccgagatgctctacgcgccgccgtccctccgagcgttgcgcgcgacggcagcaccctgctgtccttccggcaagcgacgccgctcgtcctcgacgtcgggcaagatgcagcgtcaccggcagaacgcaggccctggcgtaagcagctgtacgagaagcagccttacccggacaaccacgtcgacgactcgttacactctgtgctcgagctggccagtgtgtccttctcgtcgtcgcccaggctcgccgctcgttgctcaccgccttctgctccccaatgactctcagcgacgacgccttccacgccggatctctttcttctgatggcacgcgcctcggtcgtctcactcccgatgtcgtcgacctttactctcctcgccgtcttcatcgcgctcctcaaggacgcgctcgcaccgggagccgtcgtttggacgtgcctgatcggcggcctggccggctattgcctttactgggtcctctgtgagctgaaaccaggtgggtgaagtctgagcagctctgcatcgaagctttgcttacagtcctgctcgtccggtcgctgcaacccccctcagaacggcatccgatccgcgagacgatcatcaccctcatcctcatccactcgctctcgcccattctccggacccttaccgaggctacgacgtccgactcgatctggccgctctcgggcgtcctcttcgcgctcggtctgctgctcgtcgattactctggctcctccgacggaaggtgcaaggccttcagcgtcgaccggtgacaaccgaagactgacggctgacgccctctaatttctttccgcaagcgatggtactctatcgagctcgctcagcctgacgtcccgcctgtctggctcggtcgtcctcgcctctcgcttaccgaccaacacgcatgtctttgcgctcatcctctgcgcgctcgtgttgtttgcgctcgcgcccatgctcgctcggcagctgaaagtgcgatgtttgacgtgcaccacaatgccttgatacctgtgctgactgatcctctacccacctcagacagtcgccctcccgctctcgctcgtctggttcgccctgacactcgcgctgctcgccttcgtcgcgcgctctccgacgtgcgctgccatctttacaatcgtccatctcggactcgtcgtcctcggcccctcggcgctcgtctacagctggtcggaaaagaggtgcccctcaggagctctcgcgctgaacagcgggcgcgtgtcgctgacgctgccctctttgcttccattatagcgtcatccgtggcgattgggacgtcgcaagaccgattctgcggcgtgatgctaccggcaaatgactgctcgatcttcgaggccgacaaccatcacgtactcgcgtcgcgccgcctcttcgggctgcgggcctcggggccgacgggagatacgcgcaacccatcaaagctctcaatagcggcaagtactaaagcacccaaaccagctctagacgaacgcgttcctctcagactcgatcagccgacccagacgggcgggagagcaacctgcttgcgtctctggtcgggggaggccagcctctgcgttaagaagacgccctctagatggcttcgttcctgcggagtttgggcgcgatgtcacctgcctgacggcaactcgatgtctcagtgcagtagagtcttcgacaactgcaaggttgcgctgaggatgatgtggccagcgagccgggccgtacgcacacggacgccagcctgctgcgcgccgccccctttcatgaggctcgagcgcccctcgtcgacgacgccttccctgctgccttccaccccgccagcgccttctgctcactagtcagaagcatcttgcacgtcatatcaggcagcttctttgctcactgtcgcgagtctgacctgacgcgagcggcggcagcaggcacccacgcccgagccccttcaggccgcctctcctcgatcgagctcgcttcctccgtccagctcgctcagctcgcctctcgccgcccttaagcaccaccttcgacgtctcctactccaagaagctcccatatcaagccattccagccctcgttggaccagcgatgtgtcgtggtccccgagcccaagcctcggcgagcggtcgaccgcgagcccctctccgccgccgtgctcgtccgacgcgatcttccgcttgcaatcaaacgatatcgttctccggagcaaggaccgccagtcattcaatttacagagtggcatgctcgaggcgcagtcgccagtcctcagggagctcgtccgaaaggctaggccagagttccagaggcggaccggcgagaacaagcacggcggcctgcgaatcaccagcgtcgacgagaccggacatgacctcgaacttttcctccgcttccttcacccgcgagcctcacggccgaagatcgcttcggtcaaagatgtcatcaggtgagagcccacgcaaggtacgtcgtttgacttgcaccgcactgactgcccctcctgtcacctcccaggctttgccaggtcgccaagcggttcaagctgtcagccgttgctgcgacgatcgtctcttcgacttgcctcggtctcctcaagaccaacacagcatcggacgtgctcggtctcgccttgacttaccgccagcctgcgctcgtcgtcctcgccctgcggacgctcgacagcgccggcagccagcggttccgcgtgctcatcgaaatgccggtatcactcatcaagcgcctgcagtcccccgtactgtacgagctctggctccaccggccgctcaacagttcctacaaggagctcatcaagtcggtcatgtcggtgcgttcggcccagcgacaaaatgcgatttaaacgacactgctgacgctcctgtgctttcgcaggacccggccttctttgacgatgccaaacgccagaaggcagtctcggcgctcgagaagaaggcgcaagatgctcggcacacgcggtgcgggtgagtaggcaagagagcctgatatgtctggcgatgactgatgctgacagcctgttgccctcacgcaggccgcacccggacccggcagtggcggcagctgcgacagctgcggcggccgtctctactgaaggagctgttgccaacccgactgatgggacctcaacttccgggcccgccgtagcaaccgcaacgaccgggcctgctgtactggacggagcgactgccgccgaggtcggtgctgccgccggcgctgcgcctcctgtcgtcgtcgacaaccctacatccgcccctgctccggctgcgcctcctacgacagctcggaagtcgcctcaaccagaatgggacatcactcgctggctgtttcacttccggagcgacctcgtacctggaccgatcgtcctcggccactccctcggccgcaacgattcagggctccttgccgtccgcagtggcgactgcgaaaaggcgttcctcatcaagcccgacctcctccgcgggcacatcagcgccgacttctttgcgtcgaccttctcgggcaaccgggccggaccccagaagcggctcaacggcggcagcgcactcgtcgtctacctgcccggcgtcaaaggaacggtcctgatgtgctttcttcagtacttcacgcccggcatcgctcttaagccgacgattcaggactttaggacgctcgaagagtcagcccgcagcccctttctcgtcgaatgacgaccgctgacacgctcgctctaccttggactggcttgccccaggctctgcgagctcgccaacaactacggcgcccaccacgttgcgatcgccgccctcgtccgcagcggcaactaccacctctcgacccacggaccagagctcctcggctacgctgcgcgctatcagctgcccggcctcctggcggccgcccttcgatcattcgaccgcccgccccgcgtttgcgagtgcggcccgtgctcgcggcagacgaaggcgcacttacagctccaggacgtgccgtaccgccttctcgagcgcatgccctttgccgtcttcatacgcctcctccggcgcgaggcagagcagaccgcgacgtcgtattacgggccaaagaagtgggccgaggtcgccaagcaggtcgcagaggtcagtcccatgagacggcgccttgagacaggttttcgctgacctcgattgcgttctccctctctcgtcttcagacgccgggctggttcatagactcggaggccttcctcgcagactgacggctctcacgccgtcctccttctctcgctcggctcctcgtgatgatgacctttacgaccctgctccgacggctgacaagcgagggcgcactcgaaagattagggggtgaatggggatctctagagcggatggatgcgagcggagcgagacgaatagaacgaggcgtcaggcgccgagagcgtgtcgtcccggacgcgagatttttgatgaggagctaagcgtgtagagaaacgagaccgagagagaacgggtgtacaactacagcctccttcccgtcggcgcgcgatcggcgcccaggggaggaggagggggaaagggggtcagtagttcggaaaagagggagatgctgagaggcgtagagcgcggaaagacggaagaaaagggggcagcccaaggggaaaggaaggggggagggacggtgtcggaagcgaggggcgaagacgtgcagcagagaccggaaatgtgggtgtttttgggtagtgtggtgtgtgtgcgagggcgagtgagtggtgagagcggggtcgtaacggaggggcgttgggcggaacggtcggccaaatgggaagtgagggtgcccgaggcagaccggaagggtgggtttttggacaacagggcggcgatagagggaagtgtgcgggtaacgcgtggcgacaagccgagaggggagggaggaggcagaacgaggtccttaagccttgatggcgccgaccatggtcgcagcggcgaagctggggatcttcttgacggccggcggcatgggcgagggcgcaccgttcggggccgacggagccgacttggcagcgtcgacaacaacgacgtcgtctgagtcggacgtcttgccgctcgtcgacgactggccgtcgtcgctcgacttggacgcctggcgctccttgtcctcgtcggcctgcttgttagcgaccggggcggaggcggcagtcttcttgagctgcggcttggcgtacgaggggttggcgccggccggggccggggcagagaggacctgggcggccgtcttgccagcgccggcggggacgacgacggccgagccggcaagcgagccggtcgactccttgagactgccgaccgagccgccgagggccgggaagtcgtccgacgacgggatgcgctgccgggccaacgcagccgcgtccttctcgtccttgcgccgggcagcgccgggcgcaccggtgggcgcggccgagagcgagcgagggccacgggcggccgggccaccatgcgggccagcgttcggcgagagcggtcgcgaggccggctgagagcgagcctgggcaaactgccggttggcggcgacaccggcagggccaaggtgacggccggggacaaaggccggcgtggtggcgctggggacgtgagcgtcggcagcagcctcaccagtcgcggcggccgcagcggtagtagcaacaccctcggcagcctcaggagtggtctgggaggcggcggtagactcggtggtggcagtggcaacggcagcggcgcgcgaggcaaccttgttagcagccatggccttggacgacatcgggaagttgttggcggcgtaggacgcgcgcgggggcttgccagggaggaccgagatgggcgccggagcgatcgagccgtcgatgacgcccgggttgcggcctggagagtgaggggagagcggtcgagtcagcactggcgtcgacaagaacctcacaggcacgacacagacagtcgatgccctcggcgttcaggtgcgggaagcggcagatgtcgccgttgcggcaggcgttgttgaggaagaagctgcacggaggggcgtttccgccgacccacttggcgcccgacttagggaacttcttgccggggaaggcgccaaaggggccaaacttgcgagggaagcccttgtgctgctggggctgctgctgctggatctgctgctgctgctggaccggggccggagcctgagcgacggaaggggcagaggtctcctcggccttctgtaaggcggtcttggaaccctcaacggcggcagaggcagcctcatcctgcgtggcgggcgcggcggcgtcggaagtcgtctccgactcgacggcggtggcagcaggcgtcggcgcggcggcgacagcctggggctggaaggcaggtgcaaatggcggggccatggccgagggcatgaagggcagcatgccctggttctgtgggttgacgataaaggcggcgtcgttcgagtagtcgacggtcgtcgccggcggcgggaccgggtaggcgccctgctgctgctggggcggcggtggcggcggcggcgagaccgagtgcatcggcggtgccatgcccatggcgcccgggggagggctcgagtagaagggcgggtagaaggccggcgggtaggccgggccctgctcgtagccgtacatggccatcggcggcggcgagaaggctggcggcggcggctgaaccgggtgctggaacgcacactgggcgccgtagcggcagttcgggaagaacctggagcaagcatttgtggtcaggtgaacgaaactcgacgaggggtcgcacgagcacagactcacttgcacgggatcgactttgagacctcggctggagggatcgtgccgttgccctcgccctgagcgacgggcgactcctggccgtcctcgcccgcgccgtgctggagcggaggctgctgctgctgctgtagctggtactggcccgggtgctcgtagcctggcggcggcggcggcagcatgatgccgtgcggcggcgggcccatgtaggccataccagctggcccgtagggcatgtacatgttggccggcgggtagtagccgcctgcgtagccgggcgacatcggcatctcctcgccgggttggtacatggctgggaagcgagagttgaggcgaggagagctctggcaacgagaacgggagagccggaggcggaagctggacgactcggtaaactgcggcgtgagcgaaagagaataaggtcaggcctgcgagcgagctggcgaccgaaagccttgcagccttgtaagacgtacgaggaccggagctgtagaaaacgggcgacaggtgacgctgaggggatggttcgagggttgatagagcaaaagtcggcgtcgcgctttcctcgagcggcctgcgcggcaggcgcaaaacgaaaatcgtctcggccaacgcgcgcgtcaaggcgatcgagactcagcagcggagccgtcgtagcgcgcgaagaggagagcagcagggttcgtcctagaaagcatgcgtataaagactggtgcgaagggacgcgctgctcttctggcccgagagatatcccggtcgtgcctccgcgaggtgagtgtccgctagaaggaaagggggcgaggcgaaggagcgtccggcgtgcccgccccctcgctctctgcacgtcggccgcccctcacggcaggtcctggaccgagacgatggagaaaaccttgtcggaccggcagacgccgatcgcgccctcgttccagtcaatctcaaaaattcccgtcttggtgtcgtgctgccggatcggctcgcccgtctgcaatatgtaagcgcgcagaggtcagccagggtcgatattgagcagtcgcccacgcgcaagggacgcacctcggggttccagacaacgagcaggccgtcccagccggcgctcgcgaggtagcggccgctcggcgagaacgagagcgaaaagacggtctcagtgtgggctttgagcacgcgcaggcacgccagcgacttgacgtcccagagccggatcgtctcatcgtacgaccccctgcgcggcgcaaagtgaagcgggtcagcacctcctgcacgtaggctgtatgtgttggacaggacgcacgtcgcgaggacattcttgccgttggcgcccgtgttccaggtcatcgtgtagatttctttcgagtggcccttgaggatgcccttgcagaagcggtcgcggccctctgcccgagcaagcacgtcgtcctcgtcctttgcctcgggcgcagcgttgtcgagcgaccagatccggaccgtcatgtcgtctgagcacgacgcgagcagccggccggccgtgcccacacccggcgagaacgagacgcgattgatctcgtcttcgtgcccgcggaacgtccggattggagtcgagtggccgatccggcagacctgaattgtcttatccttgccacccgaggcgagcgtctcgttgtccagccagtcaacgtcgagtacgcagtctgcacgaggaggggagaggagtggtcagcaagagtctcaccgacgtacgtatctggtggggtaaacgcaccagagtggaactcccaggccttgacgagtcgggcgctgacggcgtcccagacgcagacgctgccatcgctaccggccgtcgcgagcaagctgcccttcggattaaatttgaggctgaagattgggcccgagtgccgggtgaggacgccgtggagctcgccctggggcgtccaaagccgggcgatgccgtcgtacgaggccgaggcgaggagcgtgccggtcggcgtgaagacgatcgaggtgatatctttacggtccgtcaccggcaggtgcttgcagacgagcggatccgactcaagctcccacttgccacccgcgccgggcccggtcggcggcttgaactcccagagccggacggttgcgtcgccggcgccggtcgcgaccttgcccttgccgtcggggttccaggcgcagacaaagacctcgcccgtgtgttcgccggcgagatgtacaatgtcgtccgctttgatctcggcaatcgccccgatccggttcgagtagtcgagccccgtctcacgcggcgtcgcagacgagacgcggaccgcgctgaacggcggcgtcgcagacgagttagggctcggcttcttcttcttcttggcggccgccgagcccgcgccggttgaggagccggccgggagaggctttgaccgcgtctcgggcgaggttgaggccgaggttgaggtcgctgctttcggtctcgacgacggcgggagaggtggcaagccgacggtcggcagcgaaggggaggaccggttcgagccagaaggcgtcggcggcttgcccgatttgcgcgaaaaagaaggtaacgggaggagacccttttccttctccttttccttcgccgccttggacgacgacggctcggcgtccgaggccgcctcgagccgcgcccgcttgccattcttgctactgctgctgctgctctccttgagcgacgagcccggctgcagaccttctgccgaccccccagcgccgtccgtctggttcgacgccttgcgcttgcccttcccgacggcgctcgccccgcttccggcgctgctcgtctcgtcccgctcgcgctgggcgagggcgtgcggcagcgtcgagctcgacggaaccgggaacagctcagaccgggagggcgggatggcgaccgaggtggatgtgtgcgagcctcggggcggggtgatggagcgttctgaggtcggtgagggaggagagtcgaggacggggaggcaagagtgtggccggaggagcgagaagggggcgttgcatggcggcagagggccgttctggagggcgagcgttaggtacatccaggtatgatcagcacaggctaccctgaattacggacgccagcctcggatggcttaaaggatccatctacgggaagctcgagcgagggcgaggcggagcgacgtacctcgccgacgtgcgtctcgacctcgcaccagcagagccccttgtgcagccagcgcaggagctcaccccgctggaccttggcgcctatcaggtcgtccggcgtcgtctgggcgagctttgactcctgggcaaacgtgaaggccgagtgttggaggttcgactcttggaggtagcagtggatgaggacgttgatctcgtgcgacgtcaggtggaccggtgaggaccggagtggcggcggctgcggctcgcgctggccagccggagatgaggccattcagacgcaaggctgattggcaaaagggtgctgggagcgggtcgggcgaggagggcggggaggcggatgaaagacggatgggggtaggagggtcggaggagagcaagaccctgggccggcttgggcgagctagccgtcgcccccgtatgggtcataatccctagtgtagccccagcttgggatacaaactcccccgcctcgcctcgacccctggagtcgtccgctgttgccgtcgtcggttgtcgctgaggtggcttagcgagaaggagagagatgtagcgtgttcgtcgaggatgagagcgacgacggtgaccgaaggacttgctctgctcgttcgcccgggcgggcagtcactcgcgctgcagccctgccgcatcgtcgcgctcagcccctttcacatgttcgctgcccacccgaccgacgctctcccttctgcagttctcgctgaggttgaccgagatttgcagacggctctgctggacggcgcgaattccgtcgccgtcaccacgaccgacctcggcatggaagcgtgaggaagagagggaccccagacgacggcgtcggcaagaggtgactgaccaccgagccggcccccctttcagcccataaagaggcgggccgagccggcctccctcctctctcctcccaaccaccacctcgtctctcgacctttgcacttctcgccgccctctcttcgacctccttcgctcccgctctctcactcgtgagtctcccgcgccgacgccttgcgcctgcggccgtcagcaggagcttcccgcaccttcgttgacctccttcccacccttcctcccgctcgcccggccagtcagccgtcgccatgcagctcgccctcaccaccctcatcctcgccgtctcctccgccctggccttgactatccagacgcccgatggctggacgacgaccgggcccaacacgatctctttttcggccgtctcatccgacccattctcgtttgccatcaccctctcgccgcagacaaactcgaacgacgcgaccgtcattgtcgagagccactcggcttccgagacgacgtttaatgtctcggccgaatgcagcaagctcttccccgagggcgacaactatgtccttagtacgtcctctcgtcgccgtcggtcacccgtctgctgcgccgttgctgaccctcctcctgtcacccgcgtcgcgcgacagacttcgtccgcaacagtacctccctgacgacactccttgcacagtcgcagaacttcaccatctcagcttcgtcgtcgtctgcctgctcgtcgttgggctcgtcgtcggcgggcgcgtcggcctcgtccacggctcgggcgtcggcttctaacgctgcggcctcggcctcgtctgctgttgcttcagcgagcgcttccgctgtccccgcctcggtatgtcctcctggccttttgagcgcttccttcttggctattgctgacgtcgatcttcttctccccttcacgcaggccgccttcagcacggctgtcatcccctcgctcggcctcctcggcgccggcgccctcgcccttctcacgttcgcttaataatgtccaccactcgtttcctccctctcttcttgacgatcccccggacactgcttgctttcaacccaccgcccggacaacctgccgcacccttcgcatcccaacctcgtagcgaccccgtctcacccctgcttcgccctgcgcacgcaccgacttgcccaacctttagaccctcccgtgcatctcaggatggcgaccttctcctccactcccgctctctcgctgaaggcgctagagagacatgagacggggcaaagctacagtagttggcggcggcagacggagtctaaaccttaggccttgtcgtcagcaaggtcagcctcgacgtcaagctccgggtacgcgcggaagaggccatcgccaaacttctgccggcggcccgaggcgacgtaggccttgatcttgtcgagcttggcgaccctgtcggcgagaagaagcgacgacgtcagcaacgaaacggtcgtgaggcgtgagggaagaggacgggggacgcaactcgtctgtcacccgccggatcgcagggtactcgggcagaagccggcccatcgcgtttgggaacgcgaactcgaggccctcgcaaacgtgccagagcattaggtcggcgtacgttagctcgtcgccgacgaggtgcttgccgtctttggccgacgggagccggttaaagtagctgcgttgggcagtcgaagcatcgcgatgtcagcttcgaaagcgccagaagggaccggggtcgagacaggacggacgacaggaacttgggcagccggaccttgcggaaatcgatcgaccgccggtgcgcctcagccttctggttctcgtagtagtcgccaacagagactgggtggctagaggagaaatgggagcgagggatcagtcgcagcacgcaggaagctcgattgcaggttagcgacgcactgcgtgtcgtgctgcagacgccggcagagggaacagcctgtcaggaccgatgcttcactcccatcgtagagacatctggacggaccacctcgctctgaaggtcacagagcgtcagaaacacctggttgaccttgtactcgccctcgccgggcggcacaagacccgtctgcgcgccaaggaaggacatgatgttgggtagctgcgagaggatgagcggctcggcgtcgggcaaagtgcgctccaggatcggtggagcgaaaggcgggacattgccggctgcgaacaggcgaggagcgagcagccgccgagcgtcaaacgggcgtcagtcgtctgtcagccagttgaacagcgctctcacgaccagcgagacgcaccagggcagtcaaattccttcccatagtactgcatgcagatttggatcgccttgtccgcgtcggcgagggcgatgtcgtcgtaggcgaagccggcatgttcgagcgcgagccggatgggctcgccgcgcccagggcagccgggccagtagatgagtttgaaggccggggcggtcatggctggtgttgatactgatctgaggatagaggaggcgctggtctgagacagaagagggtgcggctgagaggtcggagggcctgagtgcaggagatgggagaggcgagatccgcagggcaaagcaagggttccgagactgcgcgtgtgacgcggggtgagtgccccggagatgcatcattggccgccgttctgcatcgttcgaccggtcgagctccctccaacctcgactagctccctcttctacctcaacagcccgcttctcgatggacgacgactcatacccgcccggcaactttgcgcccgaggagcccgcctttgacgagcttgaggccggcgagggcgaggaaggggtttacgctgccgcagacgtcagcagctcgtcgaccgcccgggccagcaagcgcaagcgggaggcaccaccaccgaacgcgacgctgacgagcgagcagatccaggccaagctcgtacgtcccctggctggcgggtcatctggtgttcaagttcagtgctggacgaggtttgagagctgacgccgctgggcctgcttgtcgtcctcgcctcatagcaccacctcaaccgaagtctgctcgcgcaggctaagaaggcccagtcatttgagcttcagcgtctgcgcaagcatcggttcgtccaggcccggtagtctgagcctcccttaggtgtcgatgctcaaattctctggtcgctacctcgcttcgtcggcttaacaggaaggacgcgaagcgtgacgtctcgaaggacgccgagctcgacgcgtcgattgcgaccctcaaggtgcaacattcatgtcgaaggctctggtgccggcagatggccgtcgctgaccacattcgctgcctcgtcccgttcttcagggcctggctctcccggctttgatcgcgtcatcgctctatatcaagctgcagaaggcccacctcttcacccactacccgatcctgacgccgctcgtcccggcgccggcgtcgcccatggctcccgctagcgaggaggctaaggccggcaaccgtgtactgagcaacaaggccttcgccaaggaggcggccgaggcgctaaagcgcgtcaagacgtgggttgacggcgacttcaaggtccaagagaaggcgcgtgcgcgcaacgaagacgatttcgcggcggaagtccagcctgtcgcgccaacaaggaagggcacggctaccggacgcaatactgcggccggactgtcctcggctggcggtcttgctggcgaggacgggtcgtctgaaaacgaggacggcccgctgcccgacatggtctctgacgaggacgtagacggcgagaactcacttggtctcaacaccgactacttctcgggcgggtcagactcggaggatgacgatgcggcatcgcaggcatcttggtcgtccggctcggtctcgtcccagccgccggcaccggccaagaaggccaaggtcggagcgtcgtcgaaagcctccggcgaggcctcgacctcgacctcgccgccccctgcaaaggagatcaagaaggccgccggcggcaaggagaaggtcaagtcgattcccaaaaaggtgacgagctcgctattcctcccgtcgctcgcggccggctacacgtttggcggcagcgactcggagccggaagaactcagcgatgacggtaagggcgagcgcaagaaccggcgtggccaacgcgcacgcaaagcgtgcgtctcctgtaacctttcccgcatgccgatccgacggaggctgaccctccgacgtaacccctcgccctttgcaggatctgggagaagaagtacggcgccaatgccaaccacctcaaggcgcagcgggccgagggctcgatcgagggcgcctccggctcaccgccagtctacacgtccaaccgcgggacgcgcggcggccgcggcgggttcgtccagagcacccgtggcgggccggccggccgcggtcggggcggcgcgactttcgtcgtcccttcgggcaccgatggtggctggggtaagccctcaaacggttcggccgccacgagcgctttgacatctgcgccggcttcggcctcgaggggtggctttgccggcagccgaggcgtcgccagcgcaggtcgtggcggctttggcggttcaccctcgaggggcggcttcggctcgcgtccggcggcggcggcaggacccccgcgcgagaagaagcccgagaaggagatgcacccgtcgtgggtcgcgaagcagaagctcaaggagaagatgagcgccggcgtcaaggcggccggcaagaagatcacgttcgattgaatggccgtctagcttcccgtgacttgtccagacaaagtgaggggaggcacatctcgtctacgacgcccgtggttcaatcacctctctcgcaaggcgtccaagcgatccgccttgtccatctcgagctgccagccgagtgcctcgtcaagttcttcttgagcctcgtccagctcctcctgtacctcttcgacccgttcgcggcgcatgtcgacgtcaaactggactgcgctcctcgtcgcctggcggaggatcctcgtcgtccaaggccgaccaaagcagtcaacgacagcgacgccctcggcagtcggcgctgcaaggtgcgcgttcgtcacccgaagctcgtcgacgatgccgtcgtcggcttgaaatggagccccgtttgagaagtcgaggtcaccgaagcacacagtcttgagcgcccttcgttcgccggcggccagttggtctagcattccaaacaggcgcagatacgtcttgacgagttcgggtcacctcccgcggtcgaccggtacaatggctgtgactctaaggctaagcaccgccagctttggcggcagagaccgcacccgggttgagagcttgtcttgagtctcgacgtgtggcccggtgaggaccagctcttgtaagtctggcaccgtctgcgcgagatcgagaacgccgttggccgcgagccaggcggggctgtgggcgatcgggtattgagggcagcattcggggtgtagccttgacggccctcctgcgtcaagtgatcggcgccgagaacggtctcgagatgctggaccttcttgtagattgggtgacctcagcacgcggccactgcctgtgactcgctccgcaggatgagccgtaccagagacttcggccgctgagcgacgctctgaatggtttcgagggtcatgatgcaaagcgcgtccagacccaagagttcgagcgtcttagattttgaaatgtcgactgcgggcatgagcgcggcgagacaagccgtgcgttgctcgatactaggcatttctcttctccctgctcgcgagcttgacggcataggagagcgcggaggtccggacgccgttggtgagcgactggagacgtggctggagcctgggcagaggtgcggcgtcgggcgatcagcaccggcggcaggcaggcgcaggagaatggcagatgacacatactgaggagcttttggactgctgggcgctgctgaccccaagctcatcgacaaccgggcagtggagcgagtgtcgtagggcatgcgacccgagacgagtgagcggcacgataggttgagcgggacgacggacgggtcgcggtcgagtgtaacggggtgatgggttcgttcctacaactagaagcgcgtcagcttcggtccagcagtaggtaggttaggcatcgccagccatacctcagacgggcgtggcagtcgttctgggtggtcgacgttgctcgcctcggaggacaagcctggtcgagctcctctttcggcgcgtcgcgtccagaattgccatacgctaccggcatctcgccctgtcggctgccgtccctcctccatgacttgcttaatggccagctcgggaccttctatggctgcggctgcaataattgccgagcagaaaccctgcccgtgacctggacggtagcgatacagagcagactcgctggccagcatcggcctgctgcgctgcgttgccagccgacagcccgtccccggttcgagcggcaggctgtttatttcagcagctgtcgaccatcaccttctctcactcagccgtttagcccgtgcacatagcagtgatctgcccttcctccactccttcttagcatcgttctcgccttcggctccccgtcagaggagcgcgcttgcagccggccccccgaccacccccttgacttctcccgcgacgactgcctctccttgactggtcgcccgatgccgacctcgccagccgccgccggcccatctcgcccatcgctccggctccagcctggggcgtctgcccacgtaggtctgattctttaccccctgcggtaggcggccagccaatcctcgccgagatcccgcgcgcttgcgactgacttctgccgccccctcctgtctacgccggccctccgacctgtcttcaggcgaccgagccacctccggttatcaagcttgaggacctcgactcgaccttccagctgtccgagtacctcgacgtcctcgtccagcgcggcgaccgcgtccgcgaccttgtccggcttccgctcgagggctgcggcagcggcgaagacggtgacgcctgggaggtcgacgagaacctggtgagcttcggcagaggtcgtctggacgggaagctcagcgctcaagctaagaaggccttgtactctccctccagtggatctacgtccacttgctgtgagtgcagcttcagcagcgccgggcgtgcgcacgcgatcagggctgacgggcagctcggccgccctcctctcagccgcctcccgcgcgacctcacacctttgatcgtctcgctgctcgatgtctgcacggccaagacgtgtccttccatggtcgccagccactggaactgcttgtgtgcggtccacccaggcccgccgagggtgcgtcccggcccctctctctcctaacgctccgctcttcgcgcagcagcgcagtcgacgcccgtaaccgacgctgacttggagattgcgccccctgtcaacttgtagcaatgctcgtcaatcaattacatcctccacacgctcgaccattcgtcgcagattctcacctcatcaaagctctttccctcgaggttggtccctgcgcgaagtccgcgtcgtgcgccacatgcgtgagtgctgactcgacgatcgaccaaacccgtctacgcagggtctcgatctctccttcgtcaagactgcagctcgaggccgtcgcgaggcgggtcgttcgcttctttggtcacgcttaccaccatcatccggaggtctttgaaacgtgcgaggtgagtctccctccagccagcgtgcggcttcaagagctgactgctttatgtcctccgacgacgcacagggagagactgagctttgcgcccgtttggtcaacctcgtcgccgactttgaccttgtcccgatggaggacattccgctgccgatcgacctcttcctcttgcgtcccgatggcggctcgtcctcgagcggctcggacgacggcgaagacgcatcggccgacgacgaggacgcgagctggggcgttggcctccgggcggacgacgacgacgacgaagactttgtgccgcggcgggcgagcgatgatcacgcgccgcgagggatcctcatcgactttggtggcgacaagcctcgccgtcgagacgtcgcgggcgacgaagaggacgatgacgacgcagagtcagacgacgacgtcgagaacccgattgattcacaggacgacggagcaccggtcgatccggctacgctcgacgacgaaccaacggccactggtgaccctctagacgctgtcgacgccgactcggacgacgtgccgacgctcaaggcggccgacccttcgccgacgtcgtcctcgatatcgtcacctgggctcgcacatgactcgccgccgaccccgtccgactcgcccgagcctccgtttgacgacgccgacgcggcgcaccctgcggcaggcaagcagacggcggatcccccggtcgctgcggcggcgtagacgacggcggctgctgtggctgctgcttgattccgatctttttgccgccgaatccgattggcgaaaaaggtggagggcgaggccgcgagggtggcaccgcatgggcgaccgcgacggggacaaagcgagctcctccatctgacgacggacccgaccttcgggctgcgctgctctgctcgacgggctgctggttctgactctgctcgatttactcgcgcaggcgtcgtcatccatcttggcagcggcaaaggcgacgtcggccggcgcaagccgagtttgtgctgcgccctgctgctccggctccgactaactctttgccccgcgccttgctccgcgaggccgcccacgccgaacagacggctgaggccgcctcgcttgggctcgcgagcgaggtcaggcagcttgcctctcgacgtcgaccctgcttctcctgccctcttccagctgattgcgagcagctgctctcgcgtcctctcctctccgagccccctctctctccgacccccccaccttcagccgagctagctcgctcgcctcacataggccatggtcagctcgacgctcgagcgcgctgaggcccagacgaccgacaagccggccaagtttctcggcctcttcacgatcacacccaagccgcttgactacgcccaaggccggacaatcccagagtcgagggcaaattggctgtcgcagatcctgttctcttgggttacgccgatcctgttcgtcggctactcgcgtccggtaggtcctttgatctcacccttgggactttgagcccatatctgaccgtcgtgtcctctctgcgcgacagctcgagctaggcgacgtatggacgctcttaccgcgctacgaggccgagctcctagccgtcacggtgcgtgctcggctgccttttgctcgtccagctgaagtgtcgcagctctgacctctcctgtccctgctctgggtgctagcttgagcacaacttctatgagcgcgtcccaccgtcggagcggcctatccacctccaggcgaaggctgcaacaccgacgacttcgatcgaccagcagacgctcggcgaaaaggaggaggaaaagaagaagagcgagccggacgccgtgggtaaggaggaagtcgctgcgcctcctgtcgactcgtccgccgtcttgccgactgtcggtgaggctaaggtcaccgacgaaaagaccggcaaaacgaccgagggcggcaagaagtatgaccggtcgctgctgctggccttgaaccggacggtcttttggaggtgcgctctcctctgcccctcgcacagtcctcctcttcgcgcgttcacccacctacgtccatctgccgcaggttctggggcgctgcgcccatcggcctcatcgccgtcagctttaccagcttggcaccgctcgtttcccgggccctgctcgtgtacattcaggagtcgtacgcctggtcgcacccgacgcaaggcgtcacaccggtcgtaccgcgcggcatcggctacggcatcgggctcgcctttgccatctgggcgatgcagcagcttagctcgctcttcctcgcgcagtatatgcagaggtcgctcgcgaccgggtgcgtcttgagcgtcgtccttggtgacttgacgctaagatcgctgactctctcttcgcccgacagcttcatcatgcgtgccgccctcatcgccaacatctcgcgcaagagtttgcgtctttcaggagagtgcgtacagcagagcggctgcccgcaacactcatgctgctcagatgctgactcgcctcccatttgtctttgcttaggtcgcgcgccaagcaccccaacggccagctcgtcacccacatctcggccgatacgtccttcatggactggtgcgctctgctcgcgcacgacctgtggctccagcccgcgcagatcatcatcggcctcggcatcctcattcacctccttggctactcggcgcttggtgcgtccgcccaccgcgttgcggttgtccgatgctcgagctgactctgcaaactgcagttggtctcggcgttctcctcatcggcattccggctcagagcctcctcttcaagcgtttgatcgccgtgcgccatgagcgtcagtacttctgccgtacggtcgtgttcgctttgccgaggctgacaagcgcccactttcgaccaacagaaatgggaatcgtcgacgaccgcgtccggctcctccaggagatcctccaaggcatccgagttgtcaagctgatggcttacgagagctactttgagagccgcgtcatgaccttccgcagcgaggaggtcaagcgactgcgcaagaactgcctttaccgcgcaatcgtacgttgccgcgggtctacctagctcttctacctcctgcgctgaccgtctcctccaatctcagatgacggcgacgatgggcgctattcgtgagtcttttctatccagcgcgcacagagtctgagcctgacgatcgacttccttgcgtgcagccgtctttgccgctgtcctatcatttatcacctattcgctcagtggccacacgctctctccggccatcatcttctctgcactgcaggccttctcgaacattagagctccgctgctcatcctgcctctggcgctttcggtgcgttcctctttgctccaatcatgattgagaagctccatgctgacaggccgtgctcttgtaggcgctctccgatgcatacgtcggtctcggccggatctccaaggttatgctcgccggcgagatcgacaaccccgttcctgtccgcgagggcgccgctttcggtgagattttcaccccgggctgcaggtcgacgtcagcgctgattcgaccgcgctctgccccttccagccgtctcggcgcacgccgactacagctgggaggctccatcgccctctgcagggcagtcgggtctcgaagcgatgggccgaggcggcagcaataaggacaaagcggctaagaaggcagcgaagaaggccgcaaaggacggcgttgagctcgaggcgaccgagaaggcagaggaagcggcgcccttctctctgtgcgtcctcttgaccgattcgtaccgaccctcatcgaccctgctgactcgccctccaccccttcaggaccgacatcgacctcgacatcgagcgcggcagctttgttgtcatctgcggccgcgtcggctcgggcaagtcgtcgctcgtccaggcactcctcggcgagatgaagctcagccggggcacggcctacctcggcggcagcgtctcgtattgtgagtcaatggttgcctggcctcgttcctgatcaaaatggcctcctgatcgcccgcgcttcctttttctcgtgcagtcgcgcagaacccttggatccagaacgccagcctgcgcgacaacatcatcttcggtaacgctgcgccagacgaggcccgactgaaggaggccatcacgtcgtgcgcgctcgactcggacattgcgatgcgtacgtgtggctgctgccgctgctgccgctggtcgccctgctgacctttttcctcggcccacttcagtcggcaacggcctccagaccgagattggcgagcgaggtgcgttcacgtggcttctcgcttgccgtagagcgctttgctgactggacgcttcgcccgtgctgcccaggcatcaacctgagcggcggccagaaggcgcgggcctgcctcgcccgctgcgtttactctgacgccgacatctgcttccttgacgacccggtgcgtctctcggtcagcccaacgccacagccttcctagctgaccccaacgtcgccctgacttaccgcagctctcggccgttgacgctcacgtctcggccaagctcgtcgactgcttcaccacgggcccgctcagcaccaagacgcgcatcctcgtcacccatcacgtgcgtgcgactcgaccgcaggcggctgacgatgtacctgcctctctgctgacgctcaccgccgccgctttctctgcagctcgaggttctgccgaaggccgacctgatcatcacgatggtcgacggccggatcgccgagatgggcacgtacgacgagctcctgcaagctgagggcgcaatggccaagctcctcgccgagcatctcgctgcgacgcctaaagctggcgctggaggcgctggccttatcgaggcggtcgaagacatcgagcacaagaagctgcacgtcgaggacgaggtcgtcgctcacttcaaggaggaagaggagcaggaggcggtttctggcgacagcaagctcaagggcgccctgatctcggctgaagagcgcgagacaggagccgtcggcggggccgtttactcgaagtacatccgctcgatgcggggcgtatgggtttgtctcaatctcccatctctgcagaaggacacttgctaaggactgtgagcgaacctttgcagaaagcaccgaccttcctcgcactccttttcctggctcaggtcctcctttttgctatcattcgacctctcagctcttgcggctgactgcgagcaccttctctagggcgccaacgtcggaacgactgtcttcctcggctactggagcgagacctcgattgagggatgagccgagtcggcctacatgggccgtgcgtcgctagctttccttagctattgctcgtccggcactgcgctgacctgctcctgccgccgatacagtctacgccgggttgggtttcgcctacgtcgtcctcatcttctgcggtgcgtctcttcgcaatctgacccttggctagcggcgagctcactctccctccgacctgccaggctcgctcatgctctttgtgagcggcattgacagcagttacacactcttcaacgaggccttccgcggctgcatgaacgtgagtcgtgataccttgaacgcttggccgctacgcagatctgacgcttcgggtctcgacaggcctcggtcgcctggcacgattcgacacctatcggccgcatcgtctcgcgcctctcgaaagacatcatcacgctcgacgaccagctccctgcgcagtggaaccagctgatgacgcagggcatgaacgtcctcggcgtcgtcgccctcatcttctactcgtttccctggctcggcatcatgctcgtcccgctcttcctcctctactatatctttgcggccttctaccgctcctcgtcgcgcgaggtcaagcgtctcgactccaatgtgcgtgccccttagcgccatcctgagagtccggcttccgactgacccttcgttggactcaacagatgcgctcgttcatctacgccgcctttggagagatgctcaacggcatgagcaccatccgagcgtaccgcgcagaggaccgcttcatccacaaggtgcgctgaccgagctgctcgcggcggcgcaaccgctcaagctgacgctttacttcctcgcagaccgagaccctcatcgacacggagaaccgctgctactttgtcacaatcgtgcttcaacgatggctggccgtccgcctcgatgcgctcggagcgctacttgtccttgcgatctctctgtcagtcgacgcctggcctttctcttggcctgtccagccgctcacagactgcgtcttaatcgccttacgcagcttcggcgtcggcttccgcaacgataccgctccgtccaagctcggcgttgtccttacgtattctctgtcagtcgtccgaattcggtgacgagatccgactctagatcactgaccggctcctgtcatgcactcctagaacgctcacccaggtcttcagcatgctcgtcaacacttacgctcaggtcgagcaggacatgaattgcgttgagcgcacgatcaactacgccgagctgccgccggagggtacgtctccgtctgctcgatccaagcagaattcgatttcaactcagcgagccgaccccctttcgctctcgttcgacagctccgaagccgcagcgaccagagctcgcgcctgactggccttcccagggcgccatcgagtttgaccgcgttgtcctccgctaccgagacgacctgccgccggtcctcaagggcatgtcgttcagcgtcgctgcgggcgagaaggttggcatcgtcggccggtgcgttgcgtgtgccagaggccgggacgcctcgcttgcacactgagctgacgctttccttccgccctcgcccctaccaggaccggcgccggcaagtcgtcgctcctccaggcccttttccgcatggtcgagctcacggatggcgcgatccggatcgacggcgaagactgccggcaggtcgacctgccgacgctccgctcgcggatgggcatcgtcccgcaggacccctttctttggaacggcaccgtccgggacaatctcgacccggccggcctccggacagacgccgagctcaacgactcgctccgacgctgccacctcgccgctcggcccgagcagggtgccaagctcaaggcccggctcgacaagttccggctcgatgcgattgttcaagacgagggcgccaacttctcagccggcgagcgccaggtccggcctgcctgacacctcagcatgccgaccagacgaatggctgacacatttgcgccttccctctcttgcagctgctcgctctcgcccgtgtcgtcgtccgcgactctaagtgagcgctccctgcctcgctcttggccactccggcccgcagctcctgaccctctcctcttctgccgccagggtcatcgtccttgacgaggcaacgtcgtcggtcgacgtcgagacagacgccgacattcaggacacgatccgcaacgagctcggcgacaagacgctgctctgcatcgcccagtgcgtccggccccattgctgagcgtgcctcgtctgcgaactgacgccctcccctgtccgcaccgcagccgacttgcgacgatcgccttctacgaccgcgtccttgtcatggacgccggcgaggtcgcagagctcgacgagcccctcgccctctttgaccggcccggctccatcttccgcggtagtgcgtgccctcttgcgccaccgctacccccccccccctgcgtcataactcgctcgctgacgctctcttctctgtcttctcgcagtgtgcgacaaggccgccctctcgcgcgaagacattgtccgcatccgcggcgacaccgcctgagcgagcgcgtgcctcgtctcttagagtacacttttaggcggctctctcgattctaagaaatctcatgcgcatctagtttagtgatccggccatcttctctcgcggtgagggccctcgagagactgcgagcgggtcgctggcgtcggtgtaggcggggcctcgagttccgacgccgccgttgttcctggggaaaatgtcctcgtcgtcgtcctgctcgaagagcgtcgtctgcgggagggtagacccgcgccggcgaagggatgcgtcggcctcggtcttgcggatctcctccctgcagtgcgagcagaagtgctgtcagctcagggaccgacgatcggtggtccggaaggtagagaggaaaagaacgcaccactccattcggaagaagacccacatccaccgtcgcaggagctcgagcacctccatcatgaagacgccgctctcgatctcggagattgtgtgaagcttgctgctcagcttgaggctccacgtgaagcgaaggacgaggtcgacgacgatcgcgaggtaatagacggtcgtctcggaaaagaggcgctcggcccgcagaccgcgcgggtacgtcgcctgggccggcgatgcctgatgagaaagaggcggcgggtagaggagtgtcgtccctgcgagcgacggcgcctgcccgtggttggcacgcgaggcggcgtagtgcgggtggtctgaccctgtcggcgtcggcgggaagtagccgttggccgccgtcgcttggcccgagacggccgggagcgagcggtcgggcgagggcggttcactccgggcatgcgtgagcgacatggaccgcgagtggccgcggctgtgctgggcatgactggcgccggtggcgaacgcaggtaggcggccgagagcgcgggcgacaatcgacttgctgcgccgatgcggcgcgagcgagggcgagcggagcagaccgctggtcgagcccgaccgactagtcggcgacgcgacgtcgacgcggccccactcgtttgagtcgaggattgtcaggccccagtcgttcgtaacgtcccaccagaacgaatacatagagttgacgaagaccgacagaagcctgatgaagggcatgagctgcgggtcaggtgccgaaccatcaagtcgggcggaccacaggcggcggacgcaccagaggcggaagagtgggtgctcgccatgccaggtatcgtcgccgaggtcgcccgtacccttctcggcgcggacctcttcaacgacgaccttctggacggccgagaacaggatgacaggaaaggccgaggcgtatttgagcgcgttggcgagcggccgaccgttcttgtagtctgagctggcccattcaacgaggcactggcggagccggatcaagtacgggatcctgggaacaaaaggttgacgagcgccgtcaggccagcatacgcagagccctgagcagcgagacgcgacaactcacgagaccatgaaagggacgacccattcgccaagaccgctccctgcaccctcgagctgcgacgaggccagcttcccgccgaggatgaggcaggccgacacccaggcatcgccgatgactttggcaaacgaagtgaggatatcggccgtgatgacgtcgcagaagaggatgggctggccaacgggcgagctcacgcaccgccggagcgagctgcgaacggttgacaagcgcaagtcagcagtcttgcagggaaggagcggacgagctgcaagcacagaacgcgacggaccggacaaaagcctgccgctcacgcctccagaggccgttgtagggggcgacgagtccgatgacggctccgagtgccgtcagcaacggaagcagccgccaggcgtcgacccggtcctggtcgtcgccgccgacgagccagcgaaacacgagccagccagcaaacgaccaggcagtgtatgcgcccagcagaccgtagacagggccgacaagctctcgcgagcgggcaaagctcgtcttggccggcgagccgccgctcgcgagcaagattgcaccctcttctgcgaggtcgtctggctcgccgtcggggctcgaccgacttcggacgccgagaatgaagcccgtgtcgagacctagaaggtgcagaatgtgcaggttcaaggcccagagcaggatcccgagcccagcgaggaagagcacccggtaagggagggggaacgtcgtgtagaaggacgggacggtcaggctcgcgctgttggcgccctgaggtggaggcgtgccgccgatatccatctcgggccggttcttcctcgcgtgctcagtaggttaagcgccaagctagtcggtaaacggaagaggggacagtcggcctggacgagtctgcgcgcggcggcggaaggccgagagtcgaagaccggtcaagacgcgcggctggcgggaagaggtgacgaacggtcgagctgaaggccgtagaaaggagctagcgagcgcagagcgggcagagtgtcagctcaagctctcagaaggggaagtagcgctgaatttgcagaccttgagcaggaattcttgctgagattgaggaggaaggcggtcggcgtcaagaggaggtctaggcgacgactaggcgaaagtagacgcgaggacgcgacagcctcgcgacggtccaaaggcgacaggatctctacgcgctggaacgttcataaaacagctgatcaaggggatcattgctgttcagagactcgcaggaggcaggagtcagaacaggcagcataagcaatatattgtccgagggtcgtctaagcggtacagtttcaagccagcgcagcgtcgcgccgcgcccgtctcccgcacgccgtcctccacgccacattcggtcgcaacctcttcagccgaacagccagcaaccgagcgaccagccgagccagccgagcgcaaccggcgcgaaccaacagaaggcggcgccagcctcccaccaaccatcgcggaaggcgatcggcacccggaccgcctgttcgtctttgatgacaggcgcgtccgatgaggtcgtcgagggcgttgaacccgaggggaagtggccgtcgcggtagaacgcagtcatcaggtcgtccttctcgcgccagcgctcgagcagccacgccccaaacgcctttttccgctcggcctcgttcggggagtcctcccggtcctgcccgtcgacggccggcaggtcgctcgagcgcgagacggccggctgggcatcgcggtcaaagacgcggacgtggatgtggacctcgggcgggggcacgcccttgagccagatggtgatgaggttgaagtagagctgggcctggccggccggcggcacgcccggatagccgatcgttaggtcgatcagcggcaggtcgggcagcggtgtgaggtgcgagagcatcgtgtagaggccgagcgagtgcgggaggaggacatgcgttgtgtcgatctggcaggcttagagaagatcagcgaggagaggtcgaaggccaacggcaagcagtgacgaagccaacgcacaatctcgaccttgtcggcataggccttgctccttgcgcgctcatgctcgctcacgatcgtcccctcgggccaaacgttgacccagatgggccgatcgacgtcgccgacgccgtcagctgagatccgatcgagctgggccgtcagcggctggcggtcgtcgcgccagcggcgggcgaggaagatgaagtcgaagaactgcatgccccagccgacgatggggacccatctaagggaagattacggcgtcagggcgcgtctcgagctagatgacaagcgaggctggacgcacttgaggctcttcttgagcaggataaacatgccgtcagaggcgtccgcgaggtacgcaaagatccagacgtacatccagtccgagtaagcctgtcaggacgcaggagttagcgttggccagatgtttctcgtcgacttggtcaatttacctgatggttgcccatggcgacggccgtccggctgaaggcgagcccgaccggccggccctgcatgtcgcgccggacgaggctctccagctcaaccccctcgcccgcggtgatcacgaacgtcgactgcccaaagaggaccgtcatgaggatcaggagacggacaaaagctgtctttgtccagcggaggaaggcggcgtagggcttgcggagcggcggaaggagcgagagcggccagactgcgagcgggcgcagagacggatgaggagatcagcaagcctggacctggtctttgaccacagcagagtgtgataatgaaggcttgagcagcgcccagctcttgacggaggagccgacaagcagacgcctcgttcagccctgctgcagaaggcttgcgcagcggccctcccccttgctcgaggactcggcctgacgcccctgctcggcgccgcgcctatcaaagcgcacagctgggattgtcgcagaatcgagcggttggactaacacatcaactgcgtcaggttgatgaggatcatcccggcattgaagaagagcgggaagaggacgagctgcgggccgcgaagcgaggtcgtcacggagccgaagcggtcagcgcgaggcgaaggagattggcccgctgctagagacggacgttgagccagggcccgtgagacggccgctgggcgattgggatccggtagagctcggccggcatcgtgcgctgcgaggggtgaaggagaagatggtggatagggagaaggcgagagagcgagcgagagttccgcagtgtagttcaggggctaagcttacgtcaggctgcgtaattgctgggttacaccggccgtgatccccgcgcctgcttgcctccatcgcctcggccccgccgaccggccccccgcactggctacagccatctcatcttctctccgacccatgctctcgtctactcctgccgtccgccgccgggcactcgtccttgccagccggaggctgctctcgagcccgtcgccgcccaagcaggcagccgccaacaagagcggcggtctcatccaggtcggtcgccttctcgcttacttgccatcgctcgctcgccgcttgcccccggctgacactgtcgcccgctttgacccgagcgcagtccctcctgcacgggacggacgagcagcctctgcccgtcctccagcactcgaagctcatcggtcgtggcaagtatgtccacgagctcgtccgccaccgggtcatcccggcccaagccgaggcttaccggcgcgcggccgaggcgcactatggcgcgctcacgggcgggcccgacggccagctgatgggcagctgggagtgtgtcgctggcgacctcgacactcacagtacgtcctaggcgtgcaaagcgtctcgctccagtcgagtgtctccatcgtgacctgacaactcgtccttcgctgccctcgcgccgaaccggcccgcagtccacatcatccgccaccagtccctcagctcgctcacgcctgccctcctccggccgtcgtcctccgatctcctcgcgcacgtgacggagcgcgagtcttcgctcctccaagagtttgctttctcgcccgcgcacgacaacccgaagcagcaggcggcgcaggcggcggcggcggccgaggcgggcggcggcgagccgcatttcggtgacaaggtgtttgagctgaggacgtacaggctcaagccagggagcatgctcgagtgggaggcggcttggcggaaggggatcgaggctcgtcggcgattcgtcgtgcgtacccttccatctcgcgcgccgatcacatgacccggagggcagccccttttaccgccccagtgcccccgtcaggctaaccctgtacaccgctcctcctgataggagcctgccggcgcgtggttcactcaagtcggcccgctccacacggtccaccatctctgggccttcccctcgctcgccgctcgcaaggagctccgcgaccgggcctggtccgtctcgggctgggccgacaccgtccgcgagacggtcaagctcgcgcaggggatgaactcgcagatcctcgtgccgagcagctggtcgccgctcaagtagcgcgggcgagtgtggtctccctgacgaacgctctcctctcccttgtactctgcactagcctctccttcactctggccctgccccggtctgctcttccgcctgttgcttgcgggccgcccctcgtctcgaatgcccctctcacctgctcagcggtcaaagagataggtcatgcaaagagggacctctcggctgcggcgaacgccgccctcgactgcgacgcacccgcagcctgcctgctgcccctctagacgcgtgaggatctacagatccaacacgcgcccatcccgaccgcccagcgcacgaatctgcccactagcccgtctacttcgccaactgctcctgcgcggccggcttcgggaccgcaggcaggtcggccggaatagctccagccaccgagggattcgcccccgctgcagacgggaccgaaggccccgccgccgcgctcgagccagcagcgccgcccgcggtcggcacggctcctccgccctgaagccgcgcatcgagcgccttaagcgcgagcgcccgccgccgctcagcctcagcccgcgcgccgcccgggcccgggaggagcgagtaggcgccgcccgagctgaactcgtccgagccccaggggcggacaagtccgagctggacgcagagcttgaagacggcgttgccggcggcggcgatgtacttcctgtaggtggtgaggaagcaggtcggcgtcagcgatgagaaggagggctctgccaagcctgcgaacgttgagactgactggaccgggggcgggaaccacatgtggaaggcaaaggcgtcgctccggtcgccgcggaaaccgtcggcggcagcctggccctcctggtacttgacgaagcggaggtagacccaggcggcaaagaagccaaactggatgcccatgtacgggttcgaggcgacaaagatgacgaggacgttggagacgaggaggtagatgccaggcaggaccttgaccttgagcttgaggaggccagagaagagctggacctggtgctcggggatgagctgcgtgaaggcgacaaggaaaccgacctggaggcaggagaggccgtggacggtcgacccgtacctgcgagtgacgcgtaagggggcgtaagcgagtcaggcgaacgattacagagctccaggatgacgtacatcgacttgacgtcgttcacgacaaagtagacgatccacgagaagccgaccgagatgatgttgctcgcgaggatgacgacgaaggcaaacttcagtagctcagtgtacgaccagacgcgctcgaggtagcggccacagagggggatcgcgacgagtgaaacgatgaactgctcggccacgaaagacaggcgcgtccggcagtgatcagcggtgcaactcaggcgggcgccaggtcaactgcttcagagacgcacctcgatcaggttgccctcagcaaagccggctgtgatgagcgtccacgggtggtaaatgacgttgcccgggacgaggaagagccagggaaagtcctgccggggagcgggcgagaagaggccgtacgtggccgtgggcgagccgacggagtcggagccggtcaggacgcagcggacgataaagccgagcgctgagaagaaaacgagcaggccagtgaggagccgcgtcgccggagggacggcgctgcgccagcagaaggaggtccaggggatggcagggcttgtcagcggtcgggatcaggtggtcgcgtgtatagcggaccgctcggaaccgcaaagcgatcacccgactgctttctggagcggctctatccgcacgatatctacggccgacgcagacgatgagggcgagctgaagctcggagcacataggtcggccagacgtgttgcgagatcgctcgtccccaacgcgctctcgcaccgcgccgtgccgactctacggtgccggcggagaatgctgctggccaccgccgcccaatactgcgaacgtgaaccctcccgagcgccttgcgtggagcgaggactcacgccagagccgggaaaaagttgatctgcgccattgggctggcgagaggtcgggaggctgaaggggacgcggcggcggcggtcgatcacacggtcaagctcgggttgagctcggcgtccgtccttgggattggcggtgttggcgtgcggaagtagaccttcgcgcaggagcgtctgatccgatgcaagagcgcgcagaggggagtcttcgccagaagaagttgaagccgagcaaaggagagcgagtggacgttgcgagaagcaggacgagcctcgccagccgacgcgttttcgccttgcgccgaagggctcctgccgccggcccagcagcgcacgacagcgacggccagcaacagacccataccaccacccgagcagcttcttgctacgcgagtcctcgcatcgagtacctggcctggtctctgagctgaccagtagctgtattgtggatctttgacgggtcagccgtcctcccctccgaccagccgctctcacgccggccgacctcccacctccacctttcgtccgcttctctgaccggccagcagctgcccttccagccgatggcgtcccggctcatcacgggcgacattgttcgcagccgtgcgagcggagccgttgccatggtcctgcggacgggcaagcaggatgacctcaacccgccgccgccgccagcttacccgtccgacgcgcttaaccagcacccggtcgaccagccgatcccgctcgacagcgtcggcatctcgatcctcttccagaaagcccagacgactgaggaggtcggacttgtcctgccgtcggccgaggagacactccaggtcaagaaggaggatgacctcgagctgctcgaccgtctgctccagcccggcgtgcgtcttctgtctcctggcggcggccccgccgagctgtcgacagcagcggcaatcccttggcaatgcccctcaatgactgaccgcccgctatctcttcctctgacaggacattgtcaagctgtcgcacctctcgcccgagtcgggcatcgtcaccgccgtcgacatccagtgcgggctgttgcacgcgctctccaagaacaaggtcccggaccacgtcagccacaagcttttgacaggcgcgattgcggtcgaagtcggcgacaggtgcgtccttgaggtcttgcttagttaagcatcgcgcgagccgatgtctctgaggccctgcgcccggcctatgtactgacccctcacccgtctctgcgcagagtcatcaattcggactggatcggcgtcatcgagcagatcttcgaggagggtctggtggagaccgaggagaagattgcctggcgcattgctgatatgtgagtctctccttaccggccgtgcaacgtgcccgccgtgccggtgaacgtccgctgaacgtcgtcgtctgctttcgctccaggggcggcatgatggaccctgggcgaacggtggccgagctcttcccttcggacggacctggtccacctccgctgccgggctacaacaagcagcgtgacctgacgcaggagcgcgtcgtcgacatccggccgatcgtcgtccacgtctcgtggatcgctatcaatcagaaggttccgatcaacgagcaggacaaccggccgaagccgaagcggttctgggccggagccgagctgtacaagcttcagctcgtgacgacggtgacggaccacctgccgcgcgtcgcgtccaaggtccgctggcgcgagggcgttgtcgacctccgcaacaagccgacgatccactttggcaacatccccttctatgcccacatcgtcaccgagacggtcacgcatgtcgacgtcctatggcagtcgggcgagacgacgcgcgagcggacgacgagcctaatgctgcacgccaacattgacgagtacgactgctggccgggcgaccacgtcctcgtcaagggcgacgagatgggcatcgagggccgcgaggccatcgttcacaaggtcgacgcccgtgagcgcacggccgaaatcactgtcgtccccgtcaaggagggcgagcagccggccaacatgctcgtctcccttctcgagcttgacccgcacggccaagcgcctggtgcgtcgcctttcggtcgacttcgagtggtgcttctctcttgagctgatctaaccttctctgcgcaccagacacctttggcgtcggccgtggcgaactggtcctgataggcaattcgccaaatggttgcgtcccgccccgagttccccggatcggccagttcgaggagcagctcgacgaggcggagctccgggcgacgatgcacgcgtatgtcgccagcgctatcactgacttcttacaggagcccactgactgaccctctacatctccttccgcaggcttggcgttacgatgtcgaaggagggcgagcaccgcgggacgctcaaccgcaacgttgacaatatcgactggtacggcgaggtcaaggacctgcgaaccgacggcatgattgaggtgctcctcccgtccggccgggtgacgctcgagcggcaggagaacctctcgatcctcgtcgaggagggcgagccgcctctttacgacgatgagggcccgctcgagatggacggcgtcgacgaggccgacggcgagtgggaggatgagccgtacgacggccagtcgctcaccgggtccgagagcgagtacctgacggaccagctcgacgccgagacggcctcgatccggatggccgagtcggagcgggacgagtgggagcaccttgaggagaatgagcatgacggggtcgagggtctgacgacgccaccgccagagccggcgcccaccgtcgcacccatcgctgcacctcagccgtcgtcaacctcatcctcgacgccgacgacggtcgagcggcctttgaccgacacgccgccgatacctgagggcctcgtctcggcgccctcggccatcgcctccagctcgcgtcaggcaccggctgtcaaggatccaccggagtgggagcgattcgcgattcttgaggaggccgacgcgactcaccacttcttcgagcaaccggtcggcaagcccaatgcggccttcctgacgcggctccagaaggagttcaaggtgcttgcctcggccctgcccgacacgatcctcgtccggtcgtacgaggaccggatggacctcctgcgcgtgctcatcatcggcccgccagggacgccctacgtcgacgcgccgcacctgatcgacttctacctcgacccggcaaagttcccctttgagccgccaaaggcccacttccactcgtggacgagcggccggggccgatgcagcccaaacctgtatgaggagggcaaggtctgcctctcgattctcggcacgtgggagggcgagcgcaacgagagctggaagtgagtgtcgcccgcccagttggcctttaagcacctggcagtcactgacgccgccttcttgctccctcgcagccctcacaagtcttcgctcctgcagatttttgtttcgattcagggcctcgtccttgtgcgcgagccttactttaccgaaccggcctttgagaagctccgcggcacgaaggaggcccgggtcagctcgcgacagtacaagtgcgacccgacccatgctttgtctcgctctggccggcatatcagctcgagctgctgacgatcacatccttcacccttacccagcgagaaggcctttgtcctcacgcgcggcttcatcctgcacgtcctacgcaaccctgtccgcgactttgaggccgagatcgagcacctctacttcgcaaaggaccggctcggctcggcgctcaagactgcccaggagctcatcgcgatcagcgagtcgtctggcggcgttacgaacgaggacttggccgaggaggacaagtgggacgagggcgacggcgtcggtcgcctgacaaagggcgcgctgatcccgctcaaggtgcgtgctggcccctcgccttgccgaggcgggcaccgtacgagagctctatgctgacctctatctcccctattgcgcttgtcagcggacggttgccggcctcgagaccatcgcggccgagcgcgagacgaaggcgaggccgtgatcgatgcatgcggtcacagcagaagagggtgcgagagggaagtcgttcatcgtccgtgagaggggaaggctgcgcgggaagctacgaacaaaatgcgcaggcggtcgagctaggcaggtaggatgaggcgaagcgagggcaactcgaaggccagcggctcagcacgtgtcgacgagccgattgcgcggcagcggcgcgccgcccgtcatctggtcccactgtgagttgcgagtgagtcccaacagatacggtcagtgatatgaccgggcagagagtccaaagggttccagactgacagtcgtgaggttcgggttggtgtagccctcggcatagctgcggcaatgccatgtcgcgtgtcagacgagggccccgactaggacgagagcgcaacccactcaccgctcgatgtaggccgacgtcggagcctcgggcgggtcgcagcctggccaaccaaaagagcctcagcaaggttctcagcagcacgacaacgagggcaactcaccaatgctcttctcgcgctggtagacccgcacatggtcgacgagctgcgaacgggagatcttgcgatcagtcgccactctggacgacgcgaggtatccggcacttaccatgtgaactggccagaggtcctcgagcccgtcaaagtcgattgcgccaaaattgagtgagaggccaaggttgaggagaatgtactgcgggaggatgagggccggtcagtcgtgatgacggcgagatgatgaggacgaggggtcgtaccatgggctcgtacggcacaggtctcgggccgacctcggcctcggcgttggcgcccatgccagccgcctccagcgtccaggccgacttaccatcattgatccagcggatgtagccgtcgaggcctggctcgtactcgaagccgtagacgctgaaacagggctcgacgagcggcgaggtcgagtactcgtagcagttttgattggttgttgctggcgagtgagcagggccgtcagttcgtgcccaggggagtgaggcagagcgacgccagagggcgcacagacgaccgaggtcgcctgctgatagacgccgcccatgtaagggttgagatgcgaaatcgactcgtcgtcgatcgccagagtggccgacgtgttgtaccagccgtaggtcgggttgaacggcgcccactgggacgattgggagacgtggccgaccagcgtcacgggatcgacttgcgcctcaataatgtcgatctaagtcagaagtgtcagcgcttctcgttccctaccacaaggacagttctgacggacctctggggcgctgcggccgcgaaaggtgccgtccgagtaggttggacctggatgcgtctcgtccgacgggcacgtgcacgcgctcagccgctggccggggaggaaactgagcgcgccgttgcctgggtcgccctccgtgccagaagtcgtggcggtctcgggcaggccgttgagcgtttggttcgggagcgtgccgacgctgagatgctgccatgtcagtctaccgtgcaggcagcgcgaagcaaggcaaagaacgcactcgcagctgtcgtaggtgtacggcctggaagtggtggataatgtcagcttttgcaaccgagggcgttcttgatcgactgagacgctctgaccacatgccgtcgagtgtcgcgccgtagccggcccgaccgaggttgcccatggtccacgtcgccggccacaggccgtctgacgagcggcgtgagggtcagccaagggcgacaagcactgtaagagtcgcagggactgacagacgtcggaccggccaggcagtcggacggccgtctcaatgtagccaccggtgaagcagaatttattccacgtggtcaggaggccgccgacgtagctgtcgaacgctccggcgagtcagctcgagagtcgagggccaagggcaagcagagcggcggtcgacgcactccatgcctcggtgcggccgcttgtccaaggtgatgacaagcgagccgttcttggtctcgagctgaccgggcgagtaccattcgaggttgttggtcgcccctacgagattgccgtcggtcagcaggaatagcggacgagaaccgaagcaagagcgagcgagaacagcagtcgaaaacgcacaataatgaagatcttcggctgaccagaacggatcatcgccaggccagaaggttctgccctcctgctcgaattcgtcggaaaagacgagctgccagacctcgcccgtctggaggctcgtgtacgtcaacgcctcggccggcgtgtcctcgtcgatcaggccaaagtctgagcaatgggagtccgaaaatgccctcagcacagatcagcgtgggccgtatcgtgcacggacgtactgccagacatcttggggacctggcccgagccgttcgtgccgccgaggttgaaggcgccgagtgtcggcagtgacagcgagccgcgaaggacggcgatcgtcgggtagccgacaaagagaaagaggatgaggcaggcgagaaaggcgagcgtgccgagattgagcagcccacggacggtgcagatggagccgcgggcgtcgagctctttgaaggtccggtcactcggcgagaagtcgtgtaggcggtctgggtcctggatggcgacgcgatcgtcagcacgaagctacccccagagtagcggccgctgggcagaaggacgcccgtcgccagcgaggtcgaaccaggatgggtgagcgtcgtcgccctcaaagtagaactgccgtcgagccgggaggaggaaggagggtgagcttgcgacttttgggccgcgaaacgacgggccgcgagctgaccgtctcggacgtcatcttgctctcgagcgtcatggtcgacgagcctgagttggaggagcgcatcagcggccggcgactgtgccactgatcgaaagccaagtgcgcggacgatgctcgacggtcagctgcatgtcggggggccgatggtcggacgctacctagcacgcaccgacttgcccgagctcgtcgacgtccgagagtcgacggagccgcctgacagccgtgggctcatcgagtcccaggcagacggtgctttaaggaaggcgggcgcaggcttcataggtgagaggcagagagggtggtggtgggcgggaggaggcgagcagtcgagcaagccgaagacgagacgacccgccagccactacgggaggtcagcctccaaggagaagacgcgtcagacggtgccttgctggtccagccgagaggaacaggggctgaaagagaggcgcgtcgcgtcgaggcggccgccgtgcaggcgccaggagatggcgcctctggccctgctggcgacaaatgaagaactcggtcagcaagatcgcagagatgcggcctacaggcgagcctcctgtccgtcagtttcgctcagggcagcagatggctgtcgagctgtcgcttgcgaaggcatcgtcgtcggcgacgcgcgcgcagggtgcctgtccgagccagctcgaaattcaagtatccggaccttagacgggttcggccgtgcgtgtctcgtctcccgcgcgggcgcgccgctgccgctgcgacgagtccatgcggctgagcccagcgagcgacctcaccctacttgcccttccttaaacagccctcaagctcggtccaagcagctcacccctccagggcccgctcgcaaccatgtcgtttaacaagagggatgacgacgaccgctccaactcgcgtacgtccttcgacgagagcaaggagtatctgagatctccggcgccggcgcttgccaaaggatctcggctgaacgaagcggcctggtcgcctgcgtcaggcggacgagaccttctctgagagcagcatctcgggcagcatcagggcaggcaggcctgcaagttcagagatgctgacgtcgatccactgctctccttcgcagtgcacgacaagtcgacggtcctgcaggaggctcgggtcttcaaccagtcgcccatctcacctcgcgcctgccggtcgctgctcgcccggatcgtctacctgctctactgcggcgagaccttctcgacccaggaggccacccagctcttctttggcgtgactaagcttttccagcacaaggacgtgcgtccggcctcttgcttcccctgctcggcgcgagcagctcgccggaaccggcggcgcggccgctcgccgctctcgagctcaagcccttgcagcctccagagggctgacccgcttgtcgtcccttctgcagccggcattgcggcagatgatgtacctcgtcattaaggagctcagcccgattgccgaggacgtcatcatggtgacgagttcgatcatgaaggacatgcagcccaacctcgaggtcatttaccgctcgaatgcgatccgcgcactctgccgcatcaccgacgtgcgtccccctttgcctcgcgcggctgcatctgatccgggcctgacatcggccttcggtttcgccgctcttccaggcccaggcgatccagtcggtcgagcgcttcttcaagtcggccatcgtcgacaagtcgacctcgatttcgtctgcctcgctcgtctcggcctaccacctcttcccgacggccgggccgatcatcaagcggtggtcgtccgaggcgtccgaggccctgacgcccaagtcatcgtcgctctactctgcttcgtcgcagattgtccagtcgtcgtcgcacatcacgcagtaccacgcgctcggcctgctttggagcatccgcgccggcgaccgcatggccgtcaccaagatggtccagcagctgagcggtggcaagggcggcaacgctgcgagcgtgctccgcaacccgatggccgtctgcatgctcatccgcatggccgccaaggtgctcgacgaggatcccaagtacgtctctgcgcgcgaacggcagggcgccgacctttcggggttgagctgacgctctctccttccgactcgcagcgtccacaagcagatgttcgacctgctcgagggctggcttcggcacaagtcagacgtggtcaacatcgaggcggcccgcgccatctgcgagatgcgcaacgtcaccgtccaggagctctaccggcctgttgctggtgcgttgcgcggccttcgaggccgacttttacccagaccaggtctgaccttctggcccttctctcgcccgccccttgtccagtcctcaacctcttcctgacctcgcccaagccggtgctcaagtttgccgcgatccgcacgctcaacaagctcgcgcagacgcacccggccgccgtcgtcgcctcgaaccacgagatggagaacatgattaccgacccgaaccgctcgctcgcgacgtacgccatcacaacgctgctgaaggtgcgctcacctgcgggctgtctaagccgatgcgtgccaagcttagctgacttcctcgccacgtcttgcagaccggcaccgagtcgtcggtcgaccggctcatgcgccagatctcgacgttcctgaccgagctcacggacgagttcaagatgattgtcgtcgaggctatccgctcgctctcgctcaagttcccgcagaagcaggcggcgatgctgacgttcctgagcaacatgctccgcgacgagggcggctacgacttcaagcggacgatcgtcgaggccatctttgacatgatccgcttcgtcggcgagtgcaaggagacgggtgcgtcgctcgagtctagatcctagcaacagaagggccgggtcgatgctgatctcttgctgcgctcgcttgatcagcactcgcccacctgtgcgagttcatcgaggattgtgagttcaccaagctctcggtccgcatcctccacctgctcggcatcgagggccccaagacgcccaacccgacaaagtacatccgctacatctacaaccgcgtcgtcctcgagaacgccgtcgttcgtgcggcggccgtcgcgagcctcggcaagttcggcgtcgaggtcggcgacaaggaagacggcaaggtcggccggagcgtgcgggtcctcctcagccggtgcctcgacgacgtcgacgacgaggtccgcgatcgggcagccatgtacctcaaggtgctcgacgagaagacgctcgccgacgtctatgtccgcgagggtgcgtcctgctcgggcggatcagacgagaaagcagctgaccgacccctttggattctggctctcacagaatcgaccttctcgctcgcctcgcttgagtcgaagctcgtcgcttacgtcaacgatccctcatcgagctcgtcgccgtttgacgcgtcgtcgattccgaagatcagccgcgagcaggcccttcaggagtcggcccggccatcgtcgctcgacacgatgaacgccgccgtcgcgcccaaggcagccgtcgaggctgccccggcaccgtcggcgtctgaggctcagtcggcctatgcttcgcagctggccgaggtgccagaatttgccaactatggcaagattcacaagagcagcagccggccggtcgaactgacagaaagcgaaatggagtatgtcgtaacggccgtcaagcacatcttcgacgagcacatcgtcttccaggtgcgtgactcgcctcgggctctgcccatggccggcgcagactctaacgctcaatactgcccgcccgacagttcaacatctccaacacgattccagacacggtcctcgagcaggtctcagtcctgatgctggcgccagaagaggccggcctcgtcgaggacttcatcatcccgatcccgtcgctctcggcctcgacaccgggcgtcgtctacgtctcgttcacgcgcgaggactcgtcgtcgtacgcggccggctcgttcccgtgcacggtcaagtttgtctcgaaggaggtcgacccatcgagcggcgagcccgaggaggagggctacccagacgagtaccagatcgaggaggccgagctcggcgcggccgactacattgtcccgagctatgcgaccttctcgagcgaatgggagcggctcaagcagggcgcgaccgcgaccgaggtctttgcgctcagctcgtcagagagcctcaaggcggcttgcgattcgttgatcgagggtacgtccgcttgaccgcgctgcatctgacggctctcgctgaccttgatcctgctggcacccacagtcctcggcatggagccgctcggcggaacggaggtgccgcagtcgacatcagtacacacgctcacgctctctggcctcgtggcaggcggcgggggcaaggtcctcgctcggagcaggatgacctactcgtcgggcgagggcgttacgctcgagctcgccgtccgggccgagaaggagggcgcggtcgccctcgtcatgagcgccatatgagctgcgtagctgtcggtctccttctctcatctccctatataccccacgggcttaggatctagatgtccctccctgctactcgcgtgcagtcgtgaagctgtcatcagatcgccgtctaaaaggagtctacgcagcctcgccgcggatgcggacaatgtcttcgcgcgagagggcggccttgtcgcacactgcgagaagacagagaagagagcatcagcgagcgagttatgacgcagggggggggggggtagcggtggcgcaagagggcacgcactaccgcggaagatggagccgggccggtcaaagagggcgagggtggaggcagagaggagacgtacatccttgccgaggccgaccttggtgtcgaacataaggaaggccttaaggaaccagccggtcgggaagacccactcggggccctggtgatactgtcggggtgccgcaagaattccagcaagtcagtcacagaagcttcacagaagcgcaaggtgatgctgctgcgacgaggtcgggcgactgacgttccagccctgagcgacgctcttgtccgtcccgtcatttgcattgtcgtagtcgccccggtactgtgcgtcgctcgggtcgagcgtcttcatcccgagcggcccgcgcaagtgctggtcgacgagccagagcgcgccgagcgccttctcggccgtaaacagctccggggcgacgatcattgcgatcggatagttggaccggagctggtagtcggaccactcgcgcccggcgcccgagccgtagacgtccttgtagatgccccgccggttgacgagggacggctcgatgacgtacttggcgtcgtcggccgggtctggggcgagaaaatgaacgcgtcagctttggcaacgcccgtcgaacggaagcgaagcagcggaagacgcaccggccgggacatggtagtacttctcaaaattagccttgatgaggtcgccccaggcctggtacctgagcagggtcttcttgccgtcgactgaggagaaaggggggggggtcagcggcgagaaggcctcggctggcagagaaggtaaggcgcatgctcaccgacgacgtcgacgccctcgaagggaaagttgccgtcggccgagagctcgccgagccagcggagcgagctcttgagcagagcggtaatctcaatcggcgcgccgtcgcgcggggtcgccggcaggcccttgttgccagccttggccgacgagcccatcttgtccatccaggtgccgcagttgaattcgttgccgccgtggataaagccggtcgaccagtcggtgtagatcttttggtcaaagccccggtcgtccatctgcatgtcgaggttcgggccggcgttgtactcgcggaactcgatgccgctcgcgtggcgctggacaatctcctggatgagctcggcgaccgtgctcgagtaggcgtaggcccgggcgtcgtcccaggcgacccagctgtcgtcggccgggaagcgccgcttgaccgagtctgagaggatcgcgagcccgttcggcgccttgttgacatagtcctggatgttctggatgaaccaccagggcccgtcgcggcagttgtagcgcggcgtccggcacgagtcgagcaggttcgggacgaggccgtgcttgaggaccgagccaaaggcgaggatgtggtcgcgcgcggccgggaaggctccggtcgtcaggaagagcccgcggagcgaaataaacacgtcgcggccccagcagcgggcccactcggtcgtaaagtgcgtcaggccggccgcgagcgagggcacaggcttggccgggtcgatcgaggcgctcgtgacgaggccgtacatctggacggcgcacagtgcgaggtcctgcgtaaacgagtggcccgacgagatgaactcggagcactgctcgacaacggcccgacgggccgccttgtaggcctcgtacatgacgagcgcaaagtattttggccggaggaaggacgggacggtcgccttgatggcggcgaagcgctcctgaaaccaggcgaggggcgccttgaggttcggccggtgctggagctggcgctcgagccgctcggtgacatagtcgagcgcccagaaaccctggcggaggtgctcgcagagcggggcgccgaggtcgttattgcggatgatgggcgtcagcggggccatccagccctggaggccgcagtagacgagcttgccgtagccggggatctcgtagacgccgtcgccgcccgttgcgtcgcgctcctcctcgtcgcaccggtggaggaggacgttgaggtcgacgaggtcgagcgccttgaaggcctcgtcggcgccagagacggcgagcgtgtcgagatcggccttgacgtcgaccatctgggtcgcaaagagcatgacggagcccggcgggaactcgtcggggacgacaatctcggtgtaggggccctgggcgtcctcgccgacgttctgcttcggcagcgggacgtcgatcagcgtcgagggcaggcccttgagcgtcttggggtccttggcgtcctcgtacgacgaaatcttgatggaagcgccgatgatgtacttggtctgctgacgcgaaagcttgatcggcgcaatcgagccgcgcgaggtcaggtcgttcttgttgaaggccgtgtgggcgacgagcaggtaacccttgtgcgtctgcgggtgcacgcggtgcagaacaatgtactgcaagaggggagatggccgcggttagcggcgtcaagcgaggtgctcagagggcggccgaacgcacgtcgttctcctggtggacgtgaccctcggtgaagccctcgaggaccatctcggtgtgaaggtggttgaggacgcgcttgatcttgccgatgccgcggtcggcgccctcgccgccgacatcatacattcgcgtgtccgagacgaggtcgagcagcttcgggtagaggtcgtcaaagcccttgttggagccgatggccgagaagcagaaggtggcgagcgcgcccgtgctgagggcgtcctcggccgtgcgcttgtcgagcggcgactggttgtcgtgcgtgacgtccatcatgcaggcgtgcggggccgagccaaagagaggcgtaacggtgcacggccgcgaggggcccttgcccgtcggcgatggcagcgtgtcgggcgacgtaatacaggcgccgtccattgagccaatcggcttgccgacaccgaagcggtagagactaagcgaggagcggagagattgtcaaccggtgaagcagtctcggaggggaggcgtcgttgggacaactcacagccgcgactgctccttggggtcgaagccgttcatcatctcgcggatcagagagttgatgccgaggttcttgatgaagagcaggtccatctcctcgctcccggtgaagagctcggcgacgacgtagaggttcgggttgcgcttgcggccagcgtcgatcatggcaatgccgacctcgagcggggtcgagtggcagttgtcaagccggaagccgtcaaacatgccggcgagcagctcgcagtactttgtcatgtggtcccagaggaaagggttgtcctcgggcttccgaccgtagcggagcttgacgcaatcgccccagacactgccgagtggacgaggagagaagggaggcgtcagccggctgaagactgcgagaacgggatggcttctgcgtaggggacgacgcacatgacctcgcggcggaggtaggccttggagggccgctcggcgaagttggcgagcggatcggcgtcccagatccagccgttgttggcgagggcgagcgaggccgggtcgtgcttcgcagtcttggcgttcgcagggaggcgcgtaaagtaggagccaaccatgggcgacctggagtgggtggtttaggagccggcggtcaatgaagggtctcggcaggaggctagagggacgacgcacttggccgagatctcgccaaggcggggtccgccctcctcgagccgctcatacttgacgcgcgagatgacattgtcgcgctgggcgacgccgtcggcgttaaactccttgtactggtcgacgttgacgacgtcgaggaccttggcccactcgtcggcgagcgtcgcaggcgagttctcgccgaatgcagcggcgacaaaactgacggccgtctcggtcgggacgtggacgccccagcgctttgcaaacaggccgagaccctcgacggcgccgtcctggctccggaggattgcggcgagctcgccgtgcgacttgccggcgagcgcgggacccttccactcggtggccttggccttgccgccgagggcggtctcgagcgcctgcttgtgcgcggcgacgtcaacggcatagtactcgtagagccggaggtcgttgatgacctggtcgagcgcgatccggagcgtagcgaggtcggcctcggagctgatggtcgtcggcaggccacgctcggcgagcttggccgagagctcgaggacggccgagtcgagctcgagggcaggcgtcagatgcggcgagttaacgacgttgtagcccgactccgggtgatcctcgagccaggggctgttgttggccgtgtggttgaggacgacgtcggtcaggctgagcaggccgtacgtctcgcggcacttcttgaccatcgcgccaatctcggcgacgccgtcgccgacctccttgaccccggcctcggcaaacagctccgggtcgaaccgcagctggtcccagatcgagtaggggctgccgctgtcgccgcgggtctggagcggcgtaaagtggagcatattgtagccgcggcgcgaggcctcgtcgaggtagacgtcccagccgctgagcttgccctgccacttggcgatgacgctcaggattgcgagcccgtcaagcggcagcagcgtggcctcggacggcggcggaacggcaccgcccttggggtcgaccgcgtagccagcggagaggatcggcgaccggaccggcagccggatgaccgggtcgaccgagaagaagcccttggtcgactgaagccgggcgcggggacccttggggtcggccaccgagggcgcagcgtcatactcgatgaagtaggcgaacgagcccgcctgcgagatgggtactggcggggggggaggcaggtatcgaggtcagcagaggcaggcgagacggacgaagctgagcctggacagacggtcaatgtggatcggcttggagaagtcggtcggcagcctggtcggagagcgagacgcgtcgacgtcagcgcgcgggcgagcagctcgctggccgctctggctcgacttacttgcgctcggaccagcggtagcgctcaaacttgccgccgtcgagcggaaagtccgacttgaggacgccgttgcgcgtcgccgacgtgccgggctcgagcgagatgcggaggacgtagggatgggggtgcggcggagggagccggatgtactgcgaggcgagagcgcgcaacgtcagccgttgctggtcgcgagctgaggagcactaggccgtccagacacgcaccgacttctcctttgttgggctaccgtcagcctcgagctcgagctcaaagacctggatcgggccctcggtcctgccgaccgggccctcgaagaaggcgatgccctcgtcggccggcgtccgcggcgtccggctgccgtcctttgaaggagcagcgacaacgccattcttggacgcctttggcatcacaattgacgtcggcttgctgctgctggtcgtagcagccggcgaggcggcgggtttgctgctcgtcggcgggctggcagcgggcacggtcgcagaggcagcggcagcaggctgagccagcgcgctcttgctgctgctgctgctgccgtccttggccacagacttgacctccttgacgacctttttgaggaacgacatgggggtttcgggagggaggcggagggaaggtaggtgttgagaagggggtgagagggagtgagggagagagagggctgcaaagagcgtcggctctgcaagcagagggcagcgcggacgtgcggcccgtgcgcggctggcgcgaaagtgagccccgtcgtcatcctgctttccagcgcgcggaggcacacacaaaaccccgcacgctcggccgcgggggaccgaccggcaagggacgatggccagccgggggacgggcgctctagcaggcagtagggagacaggcaggcaggcttgcgacgtcccggccgacagagagacgatgcttgcgacggaatgctggtggcagagggcggagtttcgcatgtgcaccggcgtacgaacgcagctgcgtcgcaccagactggctggctctgtcgctgaccccttatcggctgcaataactccagtctgaggctagtcgagctcggggcagataggccacacagacggtcatgcgcaagaagggagaaggcggggaggggcagatcaggagcgcgtcgagcgaccaggctgcagtcgagcgggcggcttgccgagaaggcgcacatgtcagcgatcagcatcctttcagctgaagggagaacagccgcgacgtacccttgtgcgaccggccgaccgactgagaacaagagagcaagcagaagaaaggcgccaacatcagaagggagaatggagctcgcagccacctggaaaagggataggcaccgcctgcagcaagatcttcgcctgtatcctgcttgacagctgtatcctgcttgacaacgacaagaaggacgacaagaagtgccccccccccctctcgtgctctcgtgctctctctctgctcgttcgctgactcgaccctcttctctcgcccgcccagggactactgctacgactgcgactacaagaaggaagaccacaagaaggacgacgacaaaaaggacaaaaagtgcgccgctcgttctctctctcctctctgctctgtacgctggctgacccctttctccctcgcccgcccgctcgcagggacaacaacaaggacgagaaacggtgcgccctctctccttccccttgtctctcttttccgctgacgctcctgcctctcttctctcctctcagctaccgcttcgaagcctctggcgccgaccgtgcgcctcgtcctctctcgctctcctccttcgcagcgagaggtgtccctcccctctcgcccggcctctgtcatcgcatctcctggctggcctgccattctctagctgctcctgtaactaatatgctccctcctcccccctctttcctcgtctgtctctgaaggagactggcaaggagactggcaaaggcagaggcaagcgcaagggcgataagcacaagggcaagacctagtcggcccgaccctgtctcctcctctaccatcctcctcccacatcctatatagcctaccgtgccctcttctcatctctatcatgccgcatgaccactcagcaaaagtcagcgccgggactcgatcagcggtcagggactcagcaacagtcagcgagactcagcaagcgccacgcagccacgctgactgctgctgggctggacgggaggttcgagtcgtgttgtaggtgggcgagatgcgccagccagatgaaccgacgtgcgggcggcggcgggcaccggctcggagggtatttgaaggtcggacgatccagtgcctgctcttgtaaaagtgctcgcattgcaacagcctgaccagcccttgtcttcgtcttttagggactagtatggccgagcaggtcaaggtgtgagtcggttgatcacatgtaagagtcagcggcagggctgagtcgcgctggctgggaggtatgagtgcgttggcgggccgcgaccgggatgtcactaatagccagcatgtatgcgcggagatgaacgggggcgcttgcaggctctgatagggcgacggatgggtgaggaagagcttgagagggccggaggcgtggtcgaaggcaagcgaaagaaggacgtcggacgcgcgccctggccaacgagtcgttcactcaaaaccaatgcggttccatcttatacttaattgacaagacgaagttgtcaattctcaccgcttagctcagttggcagagcgtaggcttgtaatgtttccgcttgttcgcctcaggtctccggttcgattccggaagcggtgacttttgccggtccgaagctgcaaacccggcttccgcccgtctgcggcctcactccttttgcttggccgacaaagcaggtcacccatgcacgaatcccgacatccgctggctgtcttcctctgtgctcgacatgaacgaaccgagcatgcgttctctgctgtcggcgctgcttagactctcacccgcctgtctgccctctttagcttcggcggccaagcttcaacatccagactgtatatcactgctctcagtcgctgcagctgggtatcagccctcacatgacgtctgaactgtcttgaatggagaaggtgtagctgtcggcgccggcctgtcggcctgctgcccgcatcaaaggggctgccccgcgcgcgcatgtcccctgtcccatcgcgcaggggggccttctgttatttcctggcagccttcgcctcatcgctcagtcgacctgcccttcctactcgctcgaccatcacctgctcgccttcgacaattttctcagcctccatccacagcacccagcgtccagcatccatcatctagcacctagcacccagcaccagcaccagaggcagcggccccagcacggcgcaccatgggccacagtcaggccacactcgattgctcgtactgcagcctcagctttgacgacaacaagagccgcttcgagcacgaacgatcggttcattggcgcgtcattcatctccgtctgtttcaggggcagagcaggaacggttcgtccctgaggcgagagatgatggcctgatctgagcgctctgctgacactggcgtcactcctcttcgccacccgcccagtctacgagctcagccgcgcggtcgacggccttttccactgccctgcaccgtcgtgcgactggagcaacgtcgacccgtactcggcctcgaagcgcatgtggtgcagcaagatcctccgggctaccgaccggtcgggcttcggctggcacacggttaagtcgccgcacctcttctgccatggcacactccggcagacgggcgagcccgccgagccagttgaacgggtccctgaggtcgacgaggagggcaataacaatgaaggtacgctacccctgtcgaggctcgagatgggcgcaagtgccccacgccgcaggctgacaagacagacatgctagcgacctcctcagatccagacgcgcccatcgcagcgacagcaagtgaggacaggtcgagagcctcgacaacagccgtcgtcggtcacgggacgtcgccgccttcctccctgcccgcttcctcgccgaagcctgccgccagcaaggtcatccaccggtgcaaggaagttggctgccgccagacattcgacagtggccgcaagctacgcaaccacatccgcggataccactggccgtttgttcacctccgctttgacaactctggcacccgtttgttcactttgttcgactgcacgacttgctcgcaatgactaacatcgcattctcacccttccagacgcctacgaggtccgccgctgagacgacggtcacttcaagtgccccagtggagacggctttggccggagcagccttgcactgaccgcagccgttagggcgagagcgctggtcagtgtcgacgccctgcgctggcggatcgagagactgacccctcgcgatctcttatttatcggcggcttcttcagccgccccgctcggatcgaactcgctcaccggcgtcctcaactcttcggcggccggcttggctcggtacttcgaggatgactcggacgaccttagtagcgtcgacggcgcggccgaccacacgagtgacgtcgacgcgcacttcttctcgctgactgcacggccggtcgtacggcttcaatccgactgacgccgaagctgacatggaccgttcgtcatggcatttggccgagacgtacggaccggccaagctccagtcggcctccgcccgttcactctgcgacctgatcgctcgaacgcccctgtcgccagatttcggccgaatcccggtcaggtcgttgtcggtctatcgcgctgcctcgacggcaagcttctggggcgatggcaaggggctgcctcagccgagtggcgtcagtgacatcgcccgcgaccggccgtctgttagacgtccaagagttgacgaccgggtacgtccatcatcttatccgcccgacaccgcgcaacctgctgacaaccatttcattcctgaagaacctgacagctgacctgcctgacggccggcatgcgcaacgccccgagcgctagagatcagcatgcacgagcgccgtcagcgttggtcaagccgtcaacctcgctctggtcgtcggtcaagtcgtggctctggggcgactgagcggtcacttgtcgatcaagcggcaccacgctcgttcgttgtcctctccttgctgatacgctgccgctctgccaaatgagtccagcgatgcagacgtttgctgcctctcccttctccaggtgattgcaggctccgttctcccttctgatgttggcgcctctcttttgctcgctctcttgttctcccagtcggtcggccggtcggtcggtcggcgatctgtcgttcaagaatacgtcgccgcctctatctccagctatcgccgaagctgccgaccactggcatgtgcgacctctcgacaggctgctcgactcctcgttcacgcctcaggtcgacttgttgatggcatgtgtacgacgacatgaacgactctgctgctgcggaaagacgctcctgccgcccgcgacccgccagctcggccagacaaagcctccccagccacgcgtctttaatgcggcggccgagaccgtcaaaccgagaagtgcagcagacgggcgaagggttcgtcgcctggcgcacccggatgcctgcaagggcgctctctcacgagacttgcagctcctgtgcatctcatctattttgcctgctcgccgtcagcgtcctctattctttgtgcaggggaaagcatcagcgagaaaaagaatcgatcgcactctgcgccgccgccgccggtttcgtacgctcgaccttgtctctcggtgcgacgagtctaggcttcgcccctcgacgcggcccgcccacgactccggctcgccgctgcctcgacgaccttgaccgccgctgcccatcttcctccttcccgctcggaccatcaaccgcaggccgtttgagctcccaggcgattccatctcgcaacaactgtacgtccctcctgcagcgacaggccgtcagcttgaggacggccccggctccgagcttggcaggcgactacgacgaggagacgctgaccttcttccgcctgactgccttcgcctctgccagtctcaccttctccttgccctctgcccaacaccctcacatcgctccaccagtccccgggtacgagcgaacagcccgacctccttcgaacgacagccgttcgccttgactgccgccacccgcactctcatctgagacccagccggcccacccagccctccaaccccttcccttcacctccagccgacctggcccaatgccgaccatggtgcccgacctcgtgctcgtcatctacctccacggcttcaagggcgatgaatcgaccttcctcaagttccccgagcgcatgaaccacatcgttgccgagacgctgccggactgcgtcgtcgagagcgttgtcttcccagcctacgaggtgcgtcgccctgcctgcttccaatcgagccttgctgccgttcctccctgctgactgaggaaccaaacgatctatcagaccaagggcgagctcactgcggccgtcacacgcttcgtcgactggctcgcgatgctcaccgtcaagaaggagaccgagcacatgcaaatgcacggcggcaatcaacccaaggcccgcatcgtcctttgcggtcactcgtgcgtctcgcccggagctgagctgcaggaccttcaggtgcctccttgctgacccgttgcgttgctatagcatgggcggcctgctcgcggccgacgccctcatctcgatctcggctcagcactcggaggctgaggcgctcatgtggcctcggatcattggcctccttacgttcgacacgccgttcctcggtctccacccgaatgtcttcaagaatacgctcgcggacgccgcaggtcacgcccagacggccaaggatgtcctctcggccgtcggcctcgttgcgccctcgatcgtctcgtccctgacggcctggacgcgtcgcaagagctcgtcggcaacggcgacggcagccgagcagcagcagcaaaagcagcagccacagacggccgagcggccgcccaaggagtacagcgacccctttggcgacgacaaccaccattcgggcggcgactcgcacttccagcagcggtcgacggtcgacggcccgcctctgccggcgctcaaccagccgatccctcgcgaggcacccaactcggcctggggcggctttacgagcccgatcatgtacggcgtcggcgctgtcgccgtcgcggccggtgccgccggtgcctacgccaagcgcaacgacatcaacggcggcctcaactgggcccaggtgcgttaaccctctcattgcctggcatcaggctctcgccactgacgtcagtccttctatttttctataccaggaccacatgaagtacgtcggcaacctatgggacggcgagaagatgagccagcggctctttgccatcgaccgtctcatccaatctgaggagatcgtcttccgcgagtgcgtccctgtttcacctgacctcttccagatgcgctcgagctcatccttcgcgcctctcgttccgcaccccaagtttctacacgcagctgcccgagaagaagggtatcctccagccccggaccttctgcatcctaccccagccgggctcgccgacccgcggccagtgggtctcggtccgcaacaacctcgccaagagcgagatccaggcgcacaccgagatgtgtacgtcctgccccttgtcgtcgaacgaattgcacacccgaactgacccgatcctactcttcagtcgccccgctctcgaacgacaactactacgacctcggcctccgcgcggccgagtgcgtcgctctctcggtcacgctctcgctccggcacgacgccaagatccggggcgagcaggaaccgccgtcggtcgcggctcgacgggcctcgctcgcactttcgcccaacctcggtggcagcacgacgatcggcctctcgtcgggcggcgtcgccggtgttccgccgggcacgtcgcccggtggccggcgcaagtcgtcgacggcctcgcacggtgtcggtggccgccggcgctcgagcgctgctcagaccggctcgcctctcgtcgagggcatcggctcgccagacatcgagcaggtcggccgctcgccttcgcttaccggcaacccgctcagcatcggcacctttggcgtcgcgatggagaacgagatgcagcggcgtgagagcgagggtctgtcggtcgcattcgaggaggaggacgatgacggaacggcatcgcccgagaacggcgctgcccaccgcgaaaacaccggcgacctgatcgagggcctcgacgggtcggctcaggacgacctcgagcagctcggcgctccactcaagcaccaggagggcctcggtatcagcgtctgatcttcctgatctctaggccgccttcgcatgtcccttcctcgcctgttgtacaccccggttcccgactgcctctctctctttaagtcatgtcgtgtcttcctttgccctatcggatggtctctctttgctcgacgtgacgccatcgcaaaagaggggcgcccagcgcttactgctttgctgagcgatgtatgacgtggcacaggaggggggaaaggaggggggaagaagggattcggcttgaagacggcgaaaaaaaaggcttgagtttcagagggggctgtagacaatcatgtccgacccctcagaatcgctatcgtcgatggtgatcgggataatcgtcggcttccacttctgatcctcctcgctgtcgctgccggcgcggggccgcttggacttgaccggcgccggcggaggcttcggccgaggaggcgagtcggcctctgagggcggagactcgatgacgcgcgagtgtcgggctttcttctttgccgacggctgcggggacgaggcggtgaggagggagcttcgggggccgagcttgcgcgaggaagagccggaggcggccttgcccggtgtcgtcgcccggctcgtcacgcgcggggaagctcgcgtcgaggccgattcagcgagcgacgacggcccacgatcaccaggctgcttgcgcttcttatgccagggcgaggatggcttcttgggcggcgggcagcctggctcttccggaggagcgaccgtcgcggcagggcgaggccccggcgccgtctgacgcttcggagcggacggttgagatcccgaagctgtcgcagcgggagctgaagcagcgccggcagaccaagggaagtgttcctgggcccgcatgtgcttgcggagcttctgcggatcgcggtttttgtagtcgacgggacagcctggacggcagtggaagcgaccgtcggcgctgcgctggatgtagtgcgctgaaaggggcagacgacttggcatcagcagggcggacaattgagcgcagagcaagacgagactgacgccagcctgcggggtctttgagcaagagctccctcatgtgcgtgactctgcagccgacaggacgaggtacggtcagcgaggccgagcctctagagcaaaggagaagaaacgacggaccggatgtgcgcctccttccgccggagggaagagaacgcgatcggcggcttgcagtcgttgcagaccgccgtgttacccccatcggcgcccgtggcgtgcggcgcttggacgtcgggcgccgcactttttgacgccgactcggccgcggacttggtcggcgcggcagccttggggagagtgcgcttgaaggcaagcttcttgccgggcaaagagcccgccggcttcgagccagagggagtcgacgggctcggcacggccgtcggtgcagaggaggtggccttattgctggccgagccggagggagctggcggattcggctcaacccttgacgcagaagtaagggccttcttgctggccgaatgactttctgacgacgctggctgctgctgctgctgcggcggcggcctggagagtaacggggcgccttgagttgaacccggcgtcgctttggaggcggatttgggcttgaaagccggagcgggggcaagcacgggcgcaagcgaaggcagtgccagagttgaaggctcagctgaagcaaggacgggtgccggggacaaagccgccgaagcttgtggctgagatggaggcggagcgatgacttcggcaggtgcgtccgcaaccgcgcccccctcgggcgtctcgacggggtttggcgccggtgggcttcttggcggcgtcggtagcgaggctcgggaggatgccggtacaagtgtggatagagccgatgaggcgaccgccgtcgactgctcgtttacgtcgccgcgagtctctgctgcagcaggcagagacgacgccgactgcgacggcccagaggtcgccagaccggccccagcctgagtcctctcttcagtcgaggtttgggcggtcgatagctcgggcgaggcttggtatggttggtcggagctctcgacacgagcgggaccggtgggagggatcgaagacgactggctgttgttcggcaaagaggaccctgctagcccggggctcggctccggacgggatgccgccggcgaagcggccttgcgttccatcgcgagcgatgtagtctcgagagccgagggctcgattgagacggtgactgaagaggcgggtagggcgatgatcggaaggaccggcaagggcgaagcgcggactatgggtccttgggcctcggcaggcacgtttgacggcacggcgtaggctcgaggagtccagccgacgaccgtcaccggctctgtcggagcagcaggagaggattcaggcagaccagaagacggcgaccagccgacgcccgacagtcgttcctccggcttgggcgacttggtctttgggcggtttgactccaacctcgatgcctgggccgacgcagctgtagatgaggtcgatagaagcggcggcagctcagacggagccgactcgacgtcgatcgcggcaggcgggcgccggggcgaggctggttggggtggattaattgacggcatttgcgaggcgtccttggtgacggcgctggtctcggcgttcatttgctgcagaggctcgtcgacactcgcgctattgctggtggcgggccgaggtggtgcttgttgggcttccgaagcatcaacggatggtagttcggctgcgggcgcggcgacagaaggctcgacatctgcagcagcagcagcacgctcagaaggagtcgtgctgactgcggctgcggcaatgacagggctggcctttgcttccggagcgtcctgggtcggcagggctggcacagcggccatgggttcccgagcggtcgtcgcgacggccgggttcggaagctccttggcgagcgtctcgacagcgtcgagcaggctgtcgacacctccgtcagccggtggctccacggcgaaatccgacagcgccgatgtcttgagcgtctcgtcgagcacgccccaccaatgccagacggcctctgaccagcggaggaggctgcgggcgaccttctcccacttgacgggcgacaagacgtagggccgttggccgtctcgcgccaccgtgatccgagcggcagcgagggccgcgcggaggtcatcgcgcgggtcacggtactgctgaatgaaagccgaaacgagggtgaagaggttccaggccgtctggtggctcgacggcggcttggtgtcggccggcagcatcggaaaccactgctggatgtagtcggccgtctccttgagctggagcggatactcgagcagcagagtgacgatgagctgcgcagtcgacaagcaagcacatgggagacgtcagcttgcgagcgaaacgctagcaggaccagcgcaggcggaccttgaggcggaatgagtcctccttctcgccaaggatggcgtccggaccctccctggagctggccttctgcagccagacgagccgggccgagtgctctttgctccaggcgggcccaaacgtaccactttttgctcgcttgatcaggacatcgactgcctggttgagccggaagtggaggtcccgtacgctcgctatccgaggcgcgaccatgaacaggtggcggcggtcgacaggcgtctcagactgaaggagcggcaggaagaggccggcaaagaagcgatagttctcggcagagtacttggcaaagtcggccgtcgtccgatgctgctgctgctgctgctgcgggccggtcgacgtcgggacagcagtgccagcatcgaggctgtcgatcggaacgccagccggtggaagtgccgaggcggtcaagagcggcggcaccgccggtgagaggttgggatcttgagccgacgccaccggggtaggagtgggctgagcgggcacggagctcgactctggacgctgcgccactggctgcgcgccatcggctggacgaggaccggccgcaggcgacgagggcttctcgctggcggtaggactggcagtcggcgcctcgagcagcgccagggcaacgggcttctggaggatcgggcctgtcgaagccggacgcgccagcgttggcaagatggatgcgggggcggaaggccggtcctgagagactggacttgccgaagaaccgttcatcttcgagacggcgccgagggcatgcgctgtcgactccgacaccatggctcggcggaacggcaggcagtccgacttgaggtggaccgagagctgtcgcgcatcggtactgaccgaggacgcacagactgggcagacccagaggccgttcggagcgcggtcggcggggaagagggaggatgctgcgaaggagagaggagagaagtagcgtggtcagcgattgccaggctgtcggcgccaggcatgaggggagggatgtactaagttggccgtcgtcattggcgaggacgagctggcaccgggcccagtggtggaggccgtagtgggtccgccaaacggagtcctgctcgagcgggctcatggaggctgacgtcgagcggatcgaccggcaagcgtcgcaattggccagcttcgtgccaatcagaggcccgcccgggatggcccggacttgcaggtggccgtacgaggcattgttgccgactgccttccggccggtatggagaagctgaacgaggtgcagctgcagcgcctcggcaaactcttttgacgctcggtcggaaggggccggctgggctgcgatggcggtcagccgaggagctggaccggtcgatcgactggtcgattgcggtgccagcacgagccgagatggacccgcgaccgcgttgacggtcgacggctgagatccgctctggccgctggaggtgggaatccggtctggaaagaaggcttgctgcgtgtgggcgagagactgcgcagcgttgcccgcccgccgctggagctcttgctgccactgctgctgcgcctgttgccgctgctgctccagccgctgctccagctgctgctggtactgctgctggcggagtaactgctgctgctgctcgtgttcgcgttgccgctccgccaggtcgagttgcttctggcggatagcctcctcccgctgcgctttctgctgggcctcgctctcggctagcttctgggcctcttgccggagctgggcctggggctgttccttcgcagctcgttgctgcgcaagcgaaagctgctgggcctgctggcgctcggcctcccgtagagcccgctgctgggcctcttgctgggccagctgctctgcttgccgctgggaccgccggtcggcgtcttgctgagcctgccgttgggcgtgctgctcggcctggatctgggccgcctgctgggcgtgttgctccgccaactgcgctgcctccaactgggcctggaggagcaggccttgctcgtgctgttgatcggcatgctgctgctggtaggaacgcaggagctcgatccggcgctgcatcgactcggccagccgcagctgttcgatgtgacgagcctgctcctgatggagcagctgcgccagacggagctggtcctgcaaatcgaactgttggtgcggtgccggcaccggggcatgcatgtgctgctgctgctgctgctgctggggcggtgaaggcggaggggtcgaggccagtcgagacggcggtgccgaacctgactggacgggctggaagcccgactggacgtgcaggacgggcttccgatcgacagacggtccggtctcgtgcgaagctgtaccgtttgagactgagcgcgccggcggtctcgtccgcggaggtccggcctcgtgcgaggaccctaccgacgtcgggcgctgcttgccggcagcgtctagacgagcggtgccgacgccgggcgaccgtttcgactgcgggagggaagccgccgcctggtctggagtgaacgccgaagggtgctgcctgatgaagccgatgacgggactgcccgacggctgtcgttggccttgagcgccgctggcagaggcggcggagcccgagcgcttcatcggcggcgcctgctgggtcgtcgaaaagggcgtcgagccgagcccgaggccggcctggccaggacgtggatgactgctgaaggcggccgcgatctgcggtactggccgctgcgacacttgccgcggtggcggcggtgacggcggagcgaccggctgaggcgcccggagcgtcgtcgtaggagtctgactggcgccggaggtcctctgagcaggcatttcgacggggtctgaggagagtcgaagagtcaggttgtcaggacgagggctcgcgcgtcgcccgcgaggtgccgaccgggcgcaacatgagacgcacagcgagggcccttgtactggcagtctgaatggacgtgcaccgggagcgcatcagagtcggcgaatgccttgccacactcgcacgtaaagaagccggccgtattgcgatatcggatgagcgctggaggagggggggggagctcgctcgtgtcagccgacgcgtccgacccacgcctcgagaggcgtcgtcgagcactcccacgcacggtcagtcggcgagccgatgttggacttcatcaggtgcgtcgtccggatgtggatattgttgtccctgtgatcggagcagcacgcgatctgtggtgagcttggctccagagacgatctgaggccggagcagccccctcgtcggtcgagagctaggttgcctgcctgccaggcccgccacgggctcggtctctgaggatcgagctcaccagatactacgcttgacgtcgtccgtgcagagggcacactggacaaggtcctcgccggcctcgtacgccgcattccgccgctggcctcgcgctgccatcgctgagtcaagggtgagagggggctcgagcgaggcggcgcgcgccggtcgacgacgggttgaaggccagacgatcgagtccgagcctctctcggttggacgagcgagatcagaggcgagcgagagtcaagggcggacgtcgacgagggctggctgctgctgattgggctggtcggcaggagtgaggggtgatgatagtaggaaagctgggtcgcggctgtgacgaacgagggagggtcgacgcgcgggccggagcgtcgagccagcccaggcagtagtcgaacgtagtcggttgcttagaaccggggatggcctcgcaggtcatgcacagggaggtccgtggatgtagcatattatcaaccgattgctcaagctgcaggagcgcctgccgccgaccctgtgcctgcgccgatggccttcttcacctgacgacccttcgacttccccctggcctcgccaaccgcccccgccgcccaaccctctgcctggcgcctcgcttgggcctttttgacggccttgtgggccttgcgcttctgggcgacagccaacgtccgctcgaccttggacgccttcatctccttcggcgcactcgtcttgaccatcttgacccgcatcggcgcgagcgaccgcctggcctcgagcagcgtcttggtcgccttgggtcgcgtcttggctgactgctgctgagaggaattggagacaacaggcgcacctggctgagtcgggaggaaagccggtgccgcctcggacgtcggcgccttcgaggaccgcaccttgaccgaggtcggaatcaagtgctcgaccagcaagggcgacaggacgcccaacggcagaaccgcctcgagctggctgagtagccgaggagggcaagaggcctgcgtaggataggtgaaagcatcgtcaatgaaacgactcgtcacagggtgaggctctaggcaacagttgcgcacccggacaccaaggacggctgcgcgccggatgcccagggcctgcgccaggagcgcttcggccccctttgcgagcgtcacgagtcgaataccggtcgcgtcagcctcgccggcggccttgtttcgcccgttccagccggcgacggcagccggcaggtgaccgacgaggctcggcgggttgatatcggacagggagacgaagacgtagcgcagcggcgacaaagggggcggccgtggttgcctgagggcggtcgcgctcgtctcgcttgcgccggctgatactgaggcagctagcggtggcggctgcagcgacagcggcttgatcgacagctctttgccaatctcgttgatgccgagcacgaggtgtgcgagcacctctggccgggggtgcttcgccaggaagaccgcctttgggtcggccggtggcggcggcggctcgatccggttgacgccagccttagcaccctgccggcgcgagtggttcgggtcgaccggcttgcgcttcttgctcagccggccgagcttgagctggtaatcggcaacgccagcgagcaagccgcaaagcgtgtggacgaccgtcagctgaaggtgtgtcggtagcgacggcctgtgcgcacgagcaggctcctgttcagcccttccgtctttagcagtggctcgtagccctggggacgtaccacttgacgttgagcgggctctcgagcagcgccttgtagacaatctttgagttgccgacgaggccggcgtcgcgtcctttgcccctgtccgcgccgacagaagacgacgacgcggcctgagcgcggatcgagtggctgagttgatgcgtcgccgtcttcttctgccggctcagtccagagccgctgctcgatgcgatgctcggcgtggccgacatgctgcgacgggagagaagaagggccgaggcaacgatggatcggagggtgtattcgttcgaggagcaggagacgacgactggagctttcgacctgcccgagctcctgcctgccctcaagcacccatctccggcccggacgatctcccaagcaccggaccaacatcaagaccgtgcgctctcagctcgccgctcctctacctttgctgcgatgcttcgctcgccgctacccttgcttcgctcgatgacgacgcggtcggcgctcagcttgcctcgtccatcggcggtcgcccgacctccactctctgcggccggtggcacctcgtcgtcgtcgtcgtcgtcggcagctagccggtcgtccctcagcccccgcagatatgccagcagtagcggcggtggcggtccggccggctactcctcgtcggcgccctcacggcggtcgaccgggagtccgtaccgggacgacaaggacctgccgttcctcgaccggcggcttccgaagtttgagcaggtcaagccttggatccggatttacgcgacgttcgtcgtcctgcccgtggtcgtcggcctctgcgtctactcggagtggacgcgggaggaccggctcgacgcgcaagtctactcgccgacgcgcaagtacacgacgcgcttccggctgccgacccggtccgacgcgcagaatgtccgcgaggacatctggcaggttgtcagccggtccgagggcgagcgcatgctccgccgggccgagcgctcgaccacggtcgccgaggacggcacgagcatcgtcaagcggatcgatactgccgcgattgcggctaatgcgccgatcgaggatcgcgaggccgacgccgtcgtccctggcggcggcggcttctttgccgtctttgacggccactcgggcttccggacctcacacttcctcgcacggacgctcctgccttcgcttgcgctcgcgctcggccctccgtcgacggcggtggcagcggcagcatcgccggcagagtctgggtcggcggcaggagggggcctgaagacctcattggccagcctcggcaggtccgtcggcggcctccttggaggcggcggcagcagtgtcgggaacggttcgacaggaggagggactgtcgtcgagcagacggtgcggacgatccagtcgacgtttgaagcgctcgaccggtcgatcgtctgggacccggtcaaccttctctcgacgccgtcggctgcagctatgccggacgctcagcgggccctcggccaggcgatgctcctcccggctctgtcgggctcgtgtgcgctcgtcgcctacctcccgccaaagcaggagacgctctacgtcgcgctcgcaggcgactgccgggccgtcgccggctactgggtcccttcccccgcgagcctcgcgtctgatgatggccgcagcaccgaaggcagctggcgattgcgtgtcctgaccgaggaccagaccggccggtcggagaaggaggtcgctcggctccgggctgagcacccgggcgaggagcaggacgttgtccgtcgcggtcgcatcctcggcgggcttgagccctcccgggcgtttggcgatgcgcggtacaagtggccgagggagactcagaaacggtgcgtcgctgtgcctgcctcgtcgaaagactcctccggctgacgctcgtcgcctccttcttctggtccccaggctctacgaggccttcctgacggacgacgtcgagggcaagaagccccggccgacgccgccgctgtccaagacgccgccttacgtgacggcccggcccgaggtgacggccttgccgattgccggtactgacgccgccgacggcgagctccgcttcgtcgtcctcgcgaccgacggccgtgcgtgcccttttgcttcaacgcgccctcccgtctcgagcctcgctgactcgcccaactgcttctcgttgcagtgttcgaccggctgtcgaacgaggctgtcgtcggcctcgtcggcaccttcgtctcgtctcccgagctccacggctccgttccaaaggccgacgttctctcgcgcgtcctcgccccggaggccggtgccgaaggctttgacggcaagaaggagacggtcaaggcgcggaaggacgacgccgccagcgaaggcggctttgtgtttggcatggacaccaacgcggcgaccctcctcgtccgtaactcgctcgccggcgcagacgacaaacacatgcgcgagcttctgagcgtcaaggtgcgtttcttcccgtctgtccgcctgtctcccttccgctgacgtctgatgacacccttcatcagtcgccggtgacgcgcttcatgcgggacgacacgaccgtcaaggtcatcttcttcaacgagcgccctgtcgagcgcgaggtctacaagaagccgaagcagtggaccgactttctctggcgagccgatgatgagccgtagcaccatgagctttttgtcgtcgctgctcgcgaacccgtcgtcaggagatggccagcccgctggagcatggatcgagtgcagatcttttcttaagctcggacacgccgaacaggagcaagagtcaggcacgggtgtcatacatgctgggggaagcgacaggcgagataacaacgaatggttcaggcgaggcagggatgagagcaggcagaggaaactggaaggcagtcgtgcggaggttgtatgcgtgggcactggagaaagggctgtgagaggcaggcaaagttgtggtccgtgggctaggtcgaggcgagatgtgggcgagatgggtcgtgaaggtaggtcgttataaagcaggcggggcgtggaaagagtgcagcggaagtccgagcgagcgattgcaaggagaaggaggggcgcagacggggtgcgacgggcatgcgccgggcccatgctaggcgatgacgcatccgcagtcagacgagccagcgtgcgtatcgctcgtcgagttcgtggcgttgctctggctcctttgcctgttgctcctcctctcttgccgtcctcccgcaccggtaccggctcgtgcgccgccgccagcagcagcagcagataagagcccgacggccggcgcgccgccgttgattgctgccgggccgttggcgcccaccgtctcgggcccgtcggtcgttccggcgccgacgagcgagcggaggcgcgacgatgcgcgcgtatggagggcgggtcgaatgggcccgtcgtcggccgctgctttgccatccttgccatctgctcgagtgggaagcaaggcaaaggagttagcaaacaggcttcgcgaagcctctgaggcaccttgaggcgtgcgcaccctcggccggctcgatcgcaaacgttcggatgctcagatggacgattgtgctccgcccgccaggcaggactccgagtccctcgcccgccagcgtccgttcgtcgtcgagcatccggccccggtacagcaccctaatccacccaggtccatcgggcacccgatcgcctgcggcgatccattcggtcggccagctcgcccagacgagctccttgacgcgtgagatggtcgtctgaggatcgaagcggacgagccgccgttggccagagaggaggaggagcgtcagggcgactttgggcgagtcggctggcggcgcgggcggaggggcgggtgcgggcgcaggcgggtaggccgtctgtgagcgcgcgaggaagggcaaggaagagaaggtgtcaaacagggtttacgtgttctgactgaggttgcagtcgatcgactaggggcaacaaaggaacaaaatgggaccgagcaaggggggaggtggttgtcggaaaggtcgagctcccgggtccgacagggcgcagaatggatgagaaggacgaaccgtttgtctcgccttgtccgcctcgatgccaccgctcaagactgtaggcaacatcgggtacgggacgagcttgcccgccgctgcgccgccggggctgatgccgtcgccggccgcaggttcgctcagccggccgctgctcgcaagcccgctgctggagttgtcggcaggctgccggctgtcggcgtcaatgccggcgccgccgctggtggaggaggacgagctagggaagccgggagcaacgctgccgacgccggcggtgacgacagaacgagaaccgatcgggtcggccgccgccgcgggggcttgagtggtggaaaggtccggcatgggttccacttttacgagcttgcctgccttcgagcgagggagaagagcgtgtggaagaagggacgagtgataggagaaaggaggagagggcaagatgggagggactccggctgctggctcgaagcctcgggcctcgttgcttgcctttaaaggcgaggagagggctgagcgggttccggatgcaagccgggtgcgggcagacgaccgacgatgggtcgagggcaggggagcggacgagcgagcgctgctgggctgacgtcgaagggaagagcgcgaggtcgtcgatgtataagagctcgttgtgcttcgtccttgtcgtcgttgagggaagagggacgaagaaggggccggtcggtcgacgacgctgtggctgcgggcgggcggcctttgcgggacgggctcggcgtcgagtcgggcggtgtcttggccaaggtggagggagcggacgaggctctgttggctggctggctggctggctggctgctcgttggctgaccgtcttgcacgctgtttcctgggtgtacgaggtggcgaacaggagaaggccatcggcccgagaactgacgatgcagcccgagcatggcccgagcactcatcatgcccctgaccccccccgcttggagacccctcgtagcaaggaagcgggggagccgtcgccgggccgaagaccggctgcaggcggccagcgccttccagccagcctcttcccagcctagctgatgcaaacggagcgcctacaggcgaccttctgcaggctgaaggaggcagggagcaggtgacggagcgggcggcgcaaaggaggcggttccgggcaaaggtcactcgaagcgcgagaatacgcctctgccgacactcgccgcagacggaacagccgtcccgacacgtttggcccaagctggctggctagctctctcgctcgtcctgctgatggtagatgcctgtcggtgggtggtcgtagcagaacagaccacctgccaggccggcagggcggagtacgcgagagacagcttcgcgaagaggcgacgcgcagtcgccggcctccccttttacgagctcgttcgcaccttcctctttttcgccagtctatgaccaccacccagtccctcagtatcctccactctccgctcgaacgagctcatcttcctccggcgtaacgctcgatgtgatacgtcccgcaagtgacctcgctcgagaccttgtacgccgccctcctgctgtcgcatgcacaacccctccctgtcaacccgttactggcgaccgtcaacgaccccaagccgtcccagcagccaacctcaaccggcgaggtcgcttccggtaagaagaagaagaagagaccgaaaacccgtccatgctttccgtagagaggaggaaggccgcccgtcaggcctaacgggagctggacctcggcggctccggcgccgatgccggctcgaccacaatctcagcgtcgatgtcgacgtcggactcgatgcactctctgatccctccgagtctcgaagacggcggggacggcgagctcgaggagggtgaaaactcggagtcagtcgaccctccaacacggctgtcgccaacgacgccgccgccgctcggacccctatccgtcgacgctgcccctcagcctacatcccttcggcatggagccgctcagctcgtctcgctgtcggtcacgttccttatgccttccttgggacgcaagcggcctaccgacaaggaggaacacgcgggcagggcgtgccctggcggaccgtttacctcggcatcgacatcgtcctggccctcgaccggcccgatttccgcttcaaactcggccaggtcgctcgcatccagtcaggctgcaccgacgactctactcgtaccggcaccagcgctcgtcagaccctcgtccgcagcagtcccgtcctcgcttgggtcgctcgtctcgggtctcgaagcggcctacccggcgctcgaggacggtgaggacctcgagggccaagctgcactgatcgccaaaatcgcaactcagctaagacccaagcaggcgcggatcgtcctgcgcaaggccgtggacctggaggctcgagcgagagcggcacgtgttggctcggcggtcggctcgacgtcgatgtcgactcctgtttcgaactcgatcgaagcgtcgagtagtgcggctccttccttcgtgcccgagcaggatgagcgggctcgggacgggacgtcggccgtctttgccggtggcgcgacacctcgttccaaaaagacagcccttctttccttcgccagacgcggcccgactctcctcaccggtcaacattggccaaggtcaaggacaagccgtgtaatccggaaagtcggccggtatgtctggcgatcgtgcgatcctcgccctccgactgaccagagacgaaaactctcctggcctacgacaggtccctcccgcccggattgcagcagaccagcccgggcctcctgctccgctgcctgcagtcgtccaggttaagccgctcgatatcaaggccgtccgctccatctctccaccgccgtcgacctcccctccgcccgcgctcgcaaagtcaggcgtcgccggctggcccgcgtccgacgtttgggccgactgccgccagttgtccaacccgaacgactaccgctcggcccgcaaggcgttcgtcgcacgccagacggctgcgctcgcgaatgcctgctgggtcgtcaagtcggccaagggattcccggcggacacggaccagggcacgtcgtcgacgccttacccgcttgacgtcgatcgcgagttattccgtgccgatcggatcgcagaggtcgaagcgaccggtcgtgtcgtcatctcgaccggggaagtcctcgggttgtcgctgtcgcgagcggagaaggagcgacgcaggtcttccaggtggcgtggatcgacgagcggccgacggccgacggccgagcgcgaacggattctcgtgcaaaggtcagcgattgagcctgatccagggattgggacgatggacattgaccgggacggcattgacgctgagcgtccctcggcatccgttgaatcgtcaacctcgctagccgtcgcacggcctgcccatcccaacctcgcgctctcgtcagacctcgcctctttcgtcgccggccttccgactttcgccggcgtcatccagtgggtcacatacgtgccgtcagactttccctcaaatgaacgcgcggagcacgagctcgctggctttgggcaggctgccgaccggcttgccgttcagctcgaggctgcgcgagagcgcgcggcggcggcggcggtgggtgccgacggccggtgaggacggtctcgtcaaggcggactgtgaacgcgatacatcctggatgcacggcgttttcgacttctttctctctccctttcgtgactcgacgaggcttgccgaacgggactgacgagtcgccggctcgttcggccggccgcttcggcttttcggcccctttttcttgccctgccgagctcgggcatgccctgaccgagggacgcccagccacgtcgtcacgtcgtcattcgattgcctcactgtcgcgtcgccggcagacgcagcggctcactcctgcctgcagaggctttgacgatacgatctgcgtcgacgagtcggctcagccggccggcaggtcgacctttcgccccgggcgctgacgagtcgctgacagctcacctcttctcgtcgacgcgccctcataagagacaggcgccctgatcctcccggaattccatcacctctccctctgacctcaagaccaacccttcctcatgatcccgaccctcccagtcgagcgcttccatcactactgggagcgcttcgactactatcacccctcgttcagcccgtctgccctctctcctcacccggcatccggtcccactggggcgtctgcagtagcagctaccgcggcccgtcctgcgatcggcccttcacaagcggccgtcgagaacgccgcccactggagagcgtaccaccgaagctttggccgctgcgaccgaccgtggcgtggaccgagccggttcgtttgggtgcgctcgttcctctgcccctcgcttttccctcatcccaccgctgaccgggtttgctcatacctcttccagttcggcatcggctcgctcatcacatacgccgtcgtcaaacacaagacgtcttcctcgggcagcgcaagctctcacacggcccgctggccattgacagacggtcggcctcccttcttcacacggctcgacgacggctcaaggttgccttcggcgatgggctcacctcctgctgtgactctagcagcaccctcggccgcggggcctgagaccttggtcgctccagtccccgtcgtcgccaccgtaccagtcgccgccgactccgcttcagctgccccggcccagagtgatgcccaggaccgacctcaccgacgattcagctcttggtcgttggacgcgcgccgcgagcgccatcggtcgagggaggctgcgcaagtttcatcggacgaggagtctccgcatcttcagcagcagcaggtgacgccagcgatggcgcacgaggccgaggacaaggtccgtttcggctctcacactcccccttctaacttccacgagggctgacggattgatctgcgcctctccaggcccgcacgctcgccatcgagctcatgatccgcagcctccatgacctgcaggtcgagcaacagcagcaggcagccttccggccccaggtttgactgcgcaccctgcgcgcccgtccttgccctcgctcgcctctcgatgtatgccactcgcgactctgtgggacgtccaaggacagggtgcacaggcgcatataagacgaaagggcagcaggggcatgggaggatggcctagtgaaacaacaaggtgagcgacgcgcgccgcgtcaagacagaaagggagcctgcggctgaaggtacagaggctagcgagcgaccggaagagactgcagcttcctgacgtttgacggatccggcctaggaaggggagagagactatcacaggctcgaatcggcggcagcgccgacgtaagcctttttcagcggcgagccgatgcgagctgtaggaagaaagcggaggtcagccgccgccgagcaagcaaggccaggccgcctcgaaaacgctagggacgtacgagcaaactgcatactccgtcgccgggcctggtcgatcgactgctggaccgagccgttcccgtgagatgacggcagctcggccgtcgcaaacaggtgcttgggttccatcgacttgcggcgctgcgaaggggaggccgagcagggaggtcgatcagggaggtcgatcagcgtccgtaccaacaaaccccgtacgactgactagttgctcaccttttggaagacggcctgctcgcggaggtcgacgcggtactcgtcctcgctgacacgagccttctcctcccggcagcggatgacccagccgatgccgacgagcgcgggcggaagtcgctgcggcttgactggctcagcggcggccgagccgaccgacgtgtcggccgcaccttcggcgtgctcctccatctcgtcggcctcgctgaacgccggcgggcgcgggagcgacttgcggtagaaggcgagcgtcgtcgaccggccgcctttgaagacgatgtgcgtgaccgactcggtcggccgggtgaggacctgatgcagacgccaagcgaagaggtcagcaggagggctttcaagagcggcggggagaggagggccgcacctttgcgccgaggttcctcagcatctcgacaaagacgccgccggcctcgtcgccctcagccgtcttgacgtcgacaaaggcaacgacgcccttgagcgtcatgcacgggggcacatcggccgcgatcgatgcgagcgaggcccgagacttggagtcggtcagcgagacgttcgggccggcatcgagaccgtcgattgaggtgttggccgcagaggaattgttggcagagacgcggcgcgagaccgggaggcccgacgtccggcgtccaggcacaggcagcgaaggcggacccatcgttgtatcagtggctggaaccggtggcgctgctgctgaaggggctgtgattgttggctgcggtccggcctcggtcgctccgccggtgctgcgccgcgccttgtcctcacctccgacgctccgccggacgttcagcttggccaagctctcggccagacccttcatcgcagtccggccctcggcgctcagcccttggccgagaacgggagccgagacggtccgcggcgacggcggccgcgctgtcgccaaagacggcggctcgggagccgaggccttgcggatggacggcagcgcggcgagaggacgcggagcggccgggcgagaactcagggacgccggataaagcggccgagcgcgcggcatggctggcgcttgagacggagctgccgcgagggacgacggctgtgaggtttcagagagcgtcttggtcgcgaccttgggcgtcgcctttgcgagcgatgagagcgtcggcgccgcgacgccaccgcgcacggccgagcgcgggcgcgagaccgagttggctcccgtcatcggctgaggcagcctcgatggagtcgcggtcgggagcttgagcgacggcaaaccgttgaacgtcgcgagctgcgggaagctcttggccggcgtcgccttctgggcgaccgcggccgggacgtcgccgtcgtccgttggctctggcgggagggcgacgagaaagtcgcggatgccgagcgcgccctcaccgtcgtcgacatcggcccgcttgacgacctttttgcgcggcgacttgaactttttggcgagaaccttgaggtcgacgacgggcggcatccgctttgggctgatcgaaggatcagcctctggcgacgtcgtccgtgccgggtcatcgatccggtacgaggctgcagccgacggcgtctcgggccctggcggcgtcagcttgacgcgcttgctcttcttgtggggcgtcgttccggccgaggagccggcatcctggccggacgagtgggccgcacgcagcggcgaggacgacatgcacgacttcagaggcgtcttggcaggcgagtcgactcgcgagcgctttttggacgcgccaagcaccggcggcggcgacggcagacggagcgtctctagcgacgacggtggcgggccagagctgctgctcggcaggaagacgtcgacctcctcgtcgccggcagctgacggcgcgagcggcggtgtcgctacacggatctgtggcgagacgtagaatgggttgctcgcgtcgagcaggagtccggcgcgcggcgtctcgagccggagctgcttgggcggcgaggcatggcggtcatcaaacgctcgggcccgggagcgcttgatacccggattggctcgtcgcgatggcgagaggggagggtctgccgcccggccgttagaagtcggcgacggcggcggtgtcgagccgaagcggagcggcgccggctgttgcttcttgcgcggcgagggctgaatgttgaggtcgtcgtcggacccctcgtcctctggctcgggcaggaacggcacgttctcgtcgttgggtacgctgctggccgagctcgtcaggctgcttgagccagacgaccgcgcccgcggcagcctccggccgtttgctttcggacccgccacagcagtggctcccggcaggaactgggcgacagcgccaccgtcctccttggaccgcctggccgacttcctgggccggccgctgccaccgggcgaatcgaggcgggagttcaacgttgcgcgctccttgcccttgatcgacgcggagacaggtcggctgcccgtcgctgctgctcctcggctcgagctcgcgacccctagccctgcctcccagcggccgctcgagttgctgacctcgggccaccgagctgccgggcgggacgctgcagaagccgcggcatggctcgcccgcgtcgtctgaccgacgaggttgtgcgaggtcatcgaccgcgtcgtccgggcgaacgacggcactggctggacgagagggttgatccgccgagcacccgggccagcgcccgatccgaccatggcgctgagatgagggtttcctggaggaagcagatcggtcgctggtcagctctggccacctgggacccgctcgaatgggaggtgccgcctgttgcacgagcggtaggtccgcgggagcaagggagacaggcaagacgacgcgtgtcaacagaccttgtgaccgggtcgttccgttctcagggctctttgccgacttcaagaccgtttgactttggctaagtccgccgtctcgcttggcgaggatctcaggaggagctcaacggatggaccttttgagagttgaaagaaggaagaaagcgagacggcgggagtgactgttcaaaggggcggcggacgaaatcgacgacgcgtcgagaaggtgtcgcgcgcgcgccgcctgccgtacctgtcactcgcacgcagacaacggccggtcgactctcgtcctcctgctgagccgccttttgtcgtctgcgggggggagaagatggggaaccagagaccacatgagataggggaaagactgggcatgggggcgggggcggggatgggcgtggtatgagacggcgccatcaagggcggccgaggcacaccggcccggcccgcgggtcattacgagaggcagatcggacaagaggcaaagggggaaggagatgggggttgcgaggggcctctaaaagccagaagcagaagatgggcgggtctggacggccacgaaggatgagaaaagccagagcgaaagcgaaggcgtctatctatacctcctcgttctcgtcaaagatggggtgctgcgaggcagaagacaggctcggtcagcggcagcgacaacgacaggtgaaggtcgacagagcagacgcacaaggaaagagcagaggacaaagccttgcgtgccggcgctgtccttggcgatgagaagaccgtcgtcttcaactggggtagtagaagaggaaaggatggcgtcagcaaccgggcgtgagacgcagatggagacacaagaagtagacgcacgtccgacgtcgagcggaaagtcttccagctcgtcgacccggccgacctcgaaaaggatctcgacgacgtcgccgcggctaatcttgaggaactggtggcccatgtactcgagctcgaggccctggaggtcaaagtcggcgacacactcgcagcgatagaggacctcggcgtcggcaccgagctcttcccagtcagcgtcgacgtcggacgggccgtcgacctctggcagggttgaagcttggctcctggtcggcgtcgtctcggccggccgggcatcagtcgaagcggtgcgggtgccgacagtcattccgatcgcgttgtcgtctgactcgtgggcctgcgacagccgccggatgactgactcggcgaagtgctcgtggtttgatgcgtccgagccctcgaacgacatctgcgagagtgccggtccgaccgaggcgacggaggaagacgaggcgccgccgctggcgaaaccgtctgccccagaccgttgagggatcgcctgcgcactgctcctccgctcgagcccggtgtacagcggcgtcggccgttgcggcggctgcgactgcaggctgaggtcggcaatcgctggcaggtcgagcctcgacgagctgctgctgccgaggcgcttctccgagggcgacggcgtgtgcgtcgcatggcgcgacgagagctggcgcgaaaggccgggcgatggccgtgagctgatcgagttggaccgggacgaactcgcctgaggcgatgcgcgcgagcgctcgacgatgccctcgtgaatcttgttgacggagccgctcgcgagtcggacgggggcgtccaagagccgcacggagactgatggggagagggccagggtcagtctcgagaggccgaaggaggagccgctttgtagacgggtcgagctcactcttgcgcgtaattgccagctcctcgaccatctcggtcgggacgcgcgaggcttcctcccagacgcggatgatggccgggccgtcgctgctgatctgggccgactcgctgtcgacgtccatgacgacgggcgggaactcgttccagaagccagcgagcaggtcctggacgcgtcggtggaagcgggcgtggcaggcggcgagcgccttgaggacgaggtcgaggatcgttgcaaagccctcgagtagcggcggcagctcggctagcagctggtggtggagcgcgacaaacacctgggcgccctcgaggacctcctgcgggagccggtcaacgtcgccgccccgggccttggtgatgatgacgcggttgtagtcctcgtgattggcgttgcgcttgaggatgacggtccgtgggcccttacaaatggcaaagagcttaatgaaggccggcacaatctcggactggagctcgcgttcctgaggagagagaatcagggtcagcaactctcgttgtgcactcaagcagcttgcaggcaagcgaggacggaccatggcgacgcagggcccctgaaggacctgctcgacgacggcccggaaggcctcgatccgtatgtcctcgacgggctcgatgccgccgaggttaatgatgcgccgccacgagtcgagcgccttgcgctgggccacccacgactcgcgtgcccgagggccggtgctcgcgaccgccttgccgagccgcttggccgtcgtctcggccgtcattagacgcgagacgagcgctgcataagccgtctcggtcttgcggaggtcctcgtgcgatgaggccgtaaacgacatggccgaggcggtcgcggtcgaagccgaggacgagggacccttggcgcggtccttgcggaacgaggtcatgacgccgccccgctttgacttgtcctttgcgagctggctgccactggccgggccagcggcgtcgcggccgcgatgcatgatgctgtcgaccgtgtccttgcggcgcttgatctcgttgatctcgtcggccaagctccggaccgtcgtcgccgcacgctttaggttggcgtagtccgggtgggaggccggcgtctgcttgagcaggtcgtcgagcaggagcgggtatttgagcacgcgctggaccggcttgatcagcatcgacggcaggtcccacgagttggtgtgaggctggatcatcgaccacgactcggcaaaatagccggcatagcgccggtcaacgagcagctcgaggaaccgggcgtgcgcgccagactggcgcgggcagtacgacgtataggcctgccggatgcggggcatctgcgagaaggacctcggggccgacggtcagctcatgctttcgttcggagaggtattggcggcgcaccatcgtcaggaagatctcgccaatcatgtccttgccagcctcctcggccgcggccgagctcgccgcctcgagcaggctggcaaactcgtgagcgagcgcggcgaccgcctcgaggttgaggaaaacggcccggacgtcggccggcgagaggggcgaccgaatcgtcggcgccggggctgggccatggccggagccaaacgagcgctggctggcggctgtggctgaccgaggcgaggccggtgaggggaagtaagacgacgggctagccgagacgccgttaaggctaggcgcggtcgaggccgccgacgacttgggcggcggaatgtcaacgacgaggcccgcccctgtcagcaaaacgatcgactggccggccgagtcgttgctaggcgagctccggtcggcgctgccggtcgagaccttgctcttgcggtcgcctcgtccgtcgtcggtgccgccctcgaccgaggtgtgggccgtgtcgatggtcgccatcgagctccggttgctgccgctcgtcgtcggcagcgtcgtgtttccgtcggtcgtcgtcgactcggtctggctcgacggccggatgcggaagaggtaggcgtcgcggacgagggcaaggtcggccgcatacgaccgctcggtcgtcgagatctcatgcaggagatgcgcccgcttggatgtgatgggcgcaggtgagacggtgctcccagccgttccggcgacgagcatcggcagcggctgtgaattgctccgctgatgcgacggctggtgggccgagagccggctcgaggaccgcgcaggcgacggaggcgaccgctgcgaggggaaggcggtcgttccggtcgacatctgcggcagctgaaggtccgggatggccgaggttgcggcgtgcatcggtaaagagggcgaccgagccgtctcgaccggcccgtcggccgagccgtttgtcgaccgaccgaggtcgccatacgacttgccgcccggatcgagctggttggccgccgcaacgaccgcctcctcttcttcgaccgagatgacctggaagggaaggaatagcgcgtcagtgaggccgaccaatgaggtcggtctagaggagaacgacgcaccctcgcctcgcgcttcttgcgcatctgcggatcccgggcgcctccgacgaggctgccgctgctccggcttgaggttgacagcggccggctgcgcgacatgcgcggccgctctccctcggcaccatcgtcgtcgagccggacagcgccctcgtccgaggcgctccactgcgacgcccgcgaagaggccggcggcgtgtttgaccaccgggccgacgacgacgacgacagcggcattgcgtcgtccgccgtctttggccggttgcggctgacccgccgtgaccggaccgtgctgacatcgacgccggtcgccgtctcgccgaactcgcctggcgaggaagtgcctccgccaccaaccaaatgagagccatctctctcgacgcccggcaacgaggccaacgagtcggccgatgcggtcggcgaggagcccggcgtgccgcgcctagcccgcagtgggctgcgagctgggagagcaggcaagatcgaggtggtggagctgatcgaggccgaccggccgagctccgagatgttggtcagcgtccgctctgagggtaggccgagcttggacggcaccggcggtggcaggtcatcgtcggcgcagtgaagcgagcgcagaggcacatctggcgacggcgccgtcgtcgtgatgggcggtggcgctcgcctggccggaagacgcgagtgcgaggcgcttgtcggcagcgcaggcgatgtctgggcacggctattcggcggcgggaacggtccctgtggcagcgactcgcgcatcgactcgaacgaggacgagggctcaaacccaagctcggcccctccgaggcggggcgagagcccactcgtgatggtgctcgccgtgctgtttgtgcgcgaggtcgcagccgaggcgaaagacgggagccggatcgagacccaagacggccggcggagcgcctcctgccgaagcaggtcgtcctcggacgtgcttgcaaacgaggcgagcgaggccgtctctgccgactcgcggcgagctgaagcagcggctgcaaaagggagcagtggtccttcgtcagcaaggccctcgcagaccaccgtgcgagcctacgcaccgtctaattcggtcccatcccagcgatcgccgagctcggctgcctcatgcagggcctcaggtcgggttgctgtcgtctgcggctggtaaaccgtgtatggcccgttgagcgcgccgccgccgccgccgcctcctcctcctccgcctccgcctccgcctccgccacttgctgaggacccagtcgagtagcgctggctgcccgagccgggcgtataggccgagcgtgagaagcggttaccgccactacccgtcgagtcgccgagactcgggttggcgtacggatggctgctgctgccgccgctgccgcccgagccgctcgagagtcggtagtcgtacattgacgagtgggtcgacatgggcctctgctcgccccgatggtgctgctgctgctgttgctggctggtcgagaagggatgggatgacaagctcggcgatagcggcagctcgcgcgggccggtcgacatgcgcaactgcctgcgctgctggggtgaggtcgccgccgacgacgccgacatcatcgtcgtccgtggagaagtcgggccgcttgagagtgaggcgaccgacgagcgttgaccagctccctggccgccgctcgtccgcgagagggtgctcattcgcttgctggcggtcccagactcgcgacgtgacgataggccgctgccgtggctaccgacgctcgtccggaccccggcgccgtcaaagccgccgcctccccagaggactccgccggcagcgccagtgccccagctcggtcgacgggggtcgagcgagccgctgccatcggtcgaggggtccatccagctctggccgctgctgcccttccgccggccggccgaaccggcgctgccaaacgtgccgccgccgccaccgccaccgctactggaagcgaacgagtctctcgttctcggcacgccagactgattgcgtggcgcgtgaggcttggcctcggcgcctccgttagacaagggagccgagaggggcaagggctggccaaagtcaatgccgcccgtcctgggccggatcatgctcgaccggtcggcgtcctcgccaaaagagaagtcggaccgggccgaggatgagctcgtcgagtgagtccgcgacagccgggcgccgctcgtgcttccgttggacgagagctcgactgcgggcgacggagagcgggtccggctcgtggacgaggacgagggcccggcgctggcgctggcgggcggtgcagccaacgtagccggcatctccgcgcacggatgctgctgctgctgctgctgggccttggccgacgagccgcgggagtgtacgagagaggaagaggtgtcgcggattaagtaggaggtgggtgggagcggccggccgaaagggggtggtccgttgaggtcgagccgcttcggagggagcgaaggccgcgcggaagcgatggtgcgcgcgcagagggaggcgagaagaaagcgacgactcgcgggcgtcgacgagaaccgattggcgcgctaggggtggaagcagacgtcgctgatgatgtctgcgtgtcgcaggagggagggggaggtggcgtctgggctggagagggtcgacgtgctgactgcccttgccctgctgtgctcgaaccagccagccgggcgggcgagatcgcgcgcccatcgaaacgctgcggcgagagcgcgagaggactaacgacttgtctcagtttcgccctggctctccatcaaacacgacggccgccgtcgctggccaaagctgcccgagcaccgggagcgcgcgaggcagggcaaatcttcttcgtatgtaacaagagcagcagaattgggtacaaagcggagggcgagggtgagatgatcaagggagacgtgcagggagaggcgtgcagcagcaagtttcttctcagagaaaagtgtccgtacatcatggccgcgccttttgtcgacgggccagatggcggtggaggtcgatggccccgatcaggcgaccttggcgaggatcatggccgtgtgggagggcgtgtagacctggaggctgtagggagagaggggcagggcaacagggtagccagcgtcagtcaacagggtgccgtcgagagtcctgtgcctaggggacaaacaagttgcgccggccgttccactcgagcggcgttgtaaagtgcttgacggtcttgtcgatccgctcaaagccgccaaagcggtcctcgtcggtcgaaaggacgacctgataggtgccgggctcgtcgacgccgacccggaagtcgacaaacgattcggtcgggttgaagttgaagatgcagagcaggccggcccgctcaaagacaatcatcttgtcctgctcgtgcttgagcgagacgtaggcctggggggcaaggtggaagcgtcagtctcgaaggggacaggtcagactgcccgaatcgcgaagaggcgcacctgcggggcctcgagccagcggaactccttctcgagattattcatcgcgccgtcaaagtcgtagaggaagcgatagcgaagcagcggatcctcgatcaggttgaattggcgccgggcatagtggaaggacgagccgttgccctcgcgcgggaagtcgagccactccgggtggccaaactcgttgccgatgaagttgaggtagccctcgccgccgagcgtgtgcgtgatgaggctggccgggaaggagagttcagctgaggcgtccaaagcgaacaagccagacggagaacgtaccggatcatcttgtggaggctcaggccgcgggcgataatcggcgtcatctcgctcagcttcgacatgttggtgtctgatgagggccgggagggcagaggatcagcgatcgtctcggggtcgagaagctttttctgcgaggactgacacatctccttgtccatcagccaaaaggcgagcgtcttgtcgccgacgagcgcctggtcgtggctctcggcataggcgacgctcagctcgccgtggcgccggttcgtgagcgtatgggcaatgttgcccatctcccagtcggcgtccttgacctccttgaggagcttgatccacatgtcgggcacggccatcgcgagccggtagttgaagccgacgccgccgtcggcgacgggcacgcagagcgccggcatgcccgagacatcttcagcgattgtgatggccgaggggtaaagcgacttaatcatgacgttggcctgcgagcgagagaggggggcggcacgtcaagggcagaaaagggtgcaggagcgacagccgatcgagagactgacgagcatgaggtaaacgacggcctcgtcgtcgacgttgtcgccaaagtactcatggtagcctcctgccgaagacgggagcgaggtgtcagtcgagtcgtccctgcggtggttgtccgaaaggcagatcgggcgcacccgaaaagcccgtgccgatgccgtggtgcgtgtacatcatcgaggtgacgccgtcgaagcggaagccgtcaaacatgaactcctccatgtaaaagcggaggttcgagaggaggaagcgaaggacctcgtgcgagccatagttgaagagccgcctgcacaaggacggaggtcagctcagtccggctaactggcgtgaagaggtcgacgacgcacgagtcccagagctcgtgcttgcccttggggccggcgtggaagtactggtggtcggtgccgtcaaagtggttgagtctgccacgagccgccacgtcagtctcggccccgctgctcgcgcgcgctctgccagagagacgcacccgtcaaggatgttcttgctcgcatgcgagtgaaccatgtcgagcaggaccgtcaggcccatgctgtgggccgtatcaattaggctcttgaggtcctcgggcgagccgtagcgcgagctcggcgcaaagaacgacgtgacctggtagccaaacgaggcgtagtaggcgtgctccatgacagccatcctaggggcgagttgacagggaggggatcagttgacatgcgagcggcatcagaacgacggcgacgcacatctggattgtgttatagccgagctccttgatccggggcagcatgtcgcgctcaaactccttgtaggtgccgacccggccctcaggcgtggcgatgccgacgtgggcctcgtagatcttcatgccgcccttgtcggcgacgcgctgcatctccttgagcggccgcgagtgcttgaacgtataccggccagacgccggcgggttccagaagcgggcgtcgtagtctggcgactcggcgaggtcctgcgtgacgcgtgtcgcccaggccgggacgcggtcgcccgagctgccgtcggtaaacttgaagtggaccttgaccttggagtcgtgcgggatcgcaggcgcgcccgtcgctgtcggccggacgacgatctgccacttgccaaaggcgtcgaccgtcatcgggtgcgaggaccggttccagttgtctgagggcagaagtggtcagcgagagaagactgcgctaggctcgcgaggaaggccgcactgaagtcgccaaaaaggtaggcctccttcgctccgggcgcccactcgcggtagaggacgctgccgtccttgcagacttggaagccctgcagaggcgagatgcgcagctccgggtcagcctcgaacgctagcagccgtcgcgacggcaaaggaacgcacgagtccgttctcgcccgtccagcccttggagaacttgtcgaggccgccctcattctcctcgatcgttttgatccaggcctggtacttggagtagcgcttcttgtagaagggcgcaaagggctcgagcctggcggacgacgacgacgaccgagcgggcgggtcagtcttcgagctcatctcagcgcgcgcgagagagtcgagcacgaagaaggacgcaccaagggtcggtgaggacaacggcggttctgccaggatggtccaacgcaaggcgagggagatcagccttccgtccggaggcaggcaggcacgagagagcgagcagtggccgagatggccgacccgcgctgcggttgttagagctcacccgtcggtcggaacggccttggtcatggccgtctggagctctttcgtctgtgctgctgttgctgccgacattgctttgagagtaaggagggtgggtggtgggtgagaggatagatggaagaggctcagaggaggaaggccgagttcttgccctctgcagccccactggctctgcttgcctcgcggagaccccgcaagcgatgagccgcacgccccgcgaccgacgagcaactgccggcggcggtcgaccgggcagggctccgaggtcaacgcatcaacgcaggcaggagcagctagcagcatcaggcagtggtagaggcaggtccgaagagtggcttggagccagctggctgtggccttcgtgcaggtctctgcggccggaacctacgctccacggccgtcgacggtgccccccttctcctctcctcgccccacgctagagtcgacgcaagcaaggccacctcgcagcatcggaaaagcaagatggaatcgttcgtcaagggctacagttgaaatttgggcggcgccctggacgtcctttagaccttgacggccttggcaaagcgcgcctcggcctcctcaaagttgatgacgtcccagacggccttgaggtagtcgggcttgacattcttgtactggaggtagaaggcgtgctcccagatctgcagcgcgcacggaagaaagacggtcagtgagaacaggacgaccgcaggcagaggaggaataaaccgacgtcgacgccgatgatcggaatatgggtgacgagcgggtcttggttggccgtcgtcgtcacctcaagcttcttgctgaagatgttgtagccctggcagtcattgaaacacgcaggtcatcagcacgagagaggaaatgaggagaaagagcggcatgggacgcacgagccagccccagccggagccctggacggcagccgtgtcggcgttgaacttggtcttaagacctgtcagagatcaatcgaaagtcgagggtcagctcctgtcgccgatgcgccggacaggaggccgaaagagaaggggggctgaccgtcaagcgagccaaaggcctcgtcgatcgcctgcttgagcgggccgtcgcgcagcttggtcgcgtccgagccgtacggcgcgaggttcttccagaaggtgtcgtggttgatgtggcctgccggatgagcgggagaggaagacgtcagccttggtcgaggcctagagggccagggcggttatgaagagggagagaggcggggaccgacctccgccgttgaacttcatcgcgctctggagcttgatgagctgaagcgggtcgctcgccgagagcgccttgccgtaggcctcctcagcggcgttgaggccgttgacgtacgtctgatggtgcttggtgtggtgcactatatggccggtcgacattggtcagttttcagacggcagagctcgagctcgaacaggagggatggcaacggacgagtcatgatctctttcgagatcgagggctcaagcgcctgtcatgcgccgtcgagacaatcaaccggcagtgtcagcaggaattcgagaggatagccgggccgggcagaacggacgtcgtaggcgtaagggagctcgggcagcgtgtgctttgcccgggcctggagcgagacggccccggccacggccgagcggcgcgaggtcgaggcgaggagcgaggagcgggtgaggacgttcatggcgagaatcttttcaagtaagagtcgagggatgcgaaaagggttgatggtagctaggcgggagaaggctgctcgtcctcgccgccgctcagcatctctccctctgcgcggcacgtcactctctctcggccgacaaccatttcggtcccgaaagcgccgacaactcccttctcacttgctcggctctaaactaaagcaggcagtaggaacgacatgtgactgctcgccctctcaggtccgccgcagtttgcccctcgcctggccgctgtagtcacgcgacgagcctgcgccgaccccggctgcagccgcgcctgacaacagagggggaggcgtcgccagtcgaggccgcggcaccgttcctggcgggaggtcgacgtagccgagactgctcgtgtcggtcccttggctgccggcgagcgaggctgccgagttcgccgccgagagaagcggggagccgtcctttgacggcctcgtccgggcttgcttccggagcggaaggagcatctcgttgtcatcgtcgtcgctagacgagtcaaagacacctcgaccggacgtccggttgagcgcccgcttgagtgggttggtcgccggccgaggcagggcgactctcgacgtcggcgctcgagccggagggtcaaacagtccgttattggccgacgacgacgacggccaccggttttgcagcggccgagtagacaccaatgctcgcccagggccaccggtactgatgagctgcgtgactagatgccgaggtcgcggctcttgcgccacgtcgggtgcccttctgcccggcggcggagcggccggtgctgtcgagggaggtggggcgacctcgttggccgtattggtcaacgatccgcgtaacggctcgacagggtagtcatcgtcgccatcagaaaagggcgggcgcacttttggccgagcggatgccggcgcaagacgcgcagacgacgtgggcgcgggggcggcggccgagcgtgaggctgattcggccgggcttgccacttttggcgttgcagcagctgctgcggcggcgggccgcgagggtaagctgacggtcgggggacttggaggacggatggctggcgaagtatgagtagacggcggccggtacgcaggcggcgacttttgtgagtcctcgacaatcgtctcctggcttgaggtgacgaccgaagtcggtgggcggatgatcggtgacgggtgcggtaccggagcagacggcgccggaggtgagcttggagtgggcgcaggaaacatgccggtcaactcgtcccagagcgaccgaatgctctcggcctggctgaggacggcccgggcggtgccgtcgtcgccctcaaagtcagccggctcgaggccaatcgggccgtcggagatcttggcggccaagagcgctgcacggagtctgtagagggccgatcagcaagcgagacgtgtgtagctagaagggaacgcgtcggtgacgaacccttcggccggaccggtgtatgcggcggcgacgtgcgcggcccgcttgcgcaacgtctggcacgtcctgcgcgtccggaggatcgtcgcctcaatctcctgccggcgagtcgggctgagaggaaagatgtcgcaggcgagaaagtaattcgggaggggcgccggcgggaagtactcgtcgatcaggggctggagctcggccttggccgtcgtgcctgcaaggatggccgactgaatgcgctgcaatgggcaaggcgagcgagatcagcctcctagcctcccgtagattgtcgccgagccatgccagagacgccgtatgcacccagagcccgaccatgacgccgaagccgtgcagcttggtctcgagcgcgtcctgggccttctgcctgccgagggccttgagccggcgcctcagctggatgtcctcctctggcacgacctcgagcgcgagccgagccgcagatctgagctggatgttccacatgcgaaggacggccaggagcggcacgaccattggcaggaggtcgaccgcctctagggctgcgaaatgcggcagcagctgcgcgaggcagtggcagagctccggcggcgtcggggcccggcctggatggttgagcgagactgaagggaaggtcggcatagccaccgagcggcgacgggtagacgagagtcgaagcgagacctcgggcgagctggcggatgcgaggctggagtgcgagggtcgagtcgagccgacgcgtctcgagttgagagtcgctggccgaggttggacgttggcctgggagctgccgatggggtatgcgggacgtcgaactgaaggagtggttgcgctagaggaaggtcaaggggagggtcctcagatggaccgcgataagatgagatgatacagacgagatggttgggttgagggaagggttgagagagacctggcgcgtcgcccttcctcgagtcgccgccgaccgacgaatgcgtacgcgacgagagcacttcccacgaataccgcaatcctagcaaaacagcgcatagatagggtcacgctattgtgcagcatcacaaggcgctcgcaaaagctgaagctttgaaggggggcggtgctaatgcaggctgcggttcagactcgacggacgagcgaccgccatcggcttgcagtcgcccttgcggtgcaagcgaggcttcctcgagacgatagcgatggtgaagacaagactgaggactcgagaacctcgagaacctctggccgccctagtagtcctcctcccagcggactgagtcgaggcggcgagggttgtcagcatgcgaggcacagacgggcaggcgctgacgggcgactgacggcggtgggcatcctcgtcctccgactcgtcgccctcagagggcgagctgaactcgtcgggatagtcgttgctaagcaaaggtgagcggtgacgctggtcagtcggagggtgagggccacgcgttcgccaagagaccagacagaccggtagaagtcctcgtctgacagatgacgtggaaaacggcagttagcgccaccttttaaccttccctctgccggagacggcgcactcaccgttcgagtcctcgtcgcccatgtcctcctcctcgacctcctcctcgtcgctcgcgactagctcgccctcatcgggcacgtagccctcgagcgtcgcgccagtaccagcaggaactgccgccgttgcgtcgcggaagtagaggtcgtagacgtagcggtcggctgtgtcatctggaggaccaccggccggccgaggggcgagcaccttgagcttgctaggagctgacggcgctgggcttgcgttcgagactggatccggagcaaagaaagcgatacgaaggctaagcaggtgacgagacgtcaagtcggacaaggacggcgggcgcactcgagaggtagtcgcgcagcattggcaggaaggcggccatctgcgggtcgtcctcctcctcctggccgatgatgagatgattgccagacggctgcacgcccagcggcaagacctgatgggcgtctagcagcttgagcgccggcggtgccggtggtgcgtcggggtccggcctgaagacagaagaggagtcgcaaagtcggacaaggtgagccgatgcggccatacccgcgcaggctagcctgcccaggcgaaagaacgtacgtttccatgactatcggcgcccgctgcagccgtcttgacgactcccttcctcccgaaggacgggccgctgcaaagggcggtatgacccggtagcggatcgcctgctgaacggcggacgccgacgtcgacgacgacgacgacggacctgcgacggcaccgggtgggctcgttggaccactctcggctgcgagcgccatcatctcggcgatccgccgctgatgagacgaaacgctgcgaccgggtcagcacggggccaagaggaggcgaccgcgaggggtgagcctcacgcgcagagcttcgcctccctccttctcctgccagccttcgggtaccgtctcggcgagccggaagacacccttgccctgctgctcggcggcgggcgcggcgggcgcgcccctcgaccgcttctttggccgaggctcagactcggcgatgactgggcgcagagacggcaggcggcggacaggtcagagcccgagtttgattgggaggggcgatcaggaggaggggaggggggcgctaccgagctggtcgagcgggtcctcggtgaccttgcgcttgatccggaggatcgtgtactgggctggcggacgggcactctccatcatcatcgtctcgactttcgccctgcaagtcgggaaagaggtcggtggtcgaggtggtcgaggtcagagggcaggagtagtcaggagccagcagcgtcgctgggcgactttcgcctccgaggttccgaccgggcgagctgggctcgacgacagcaagctggcaagcacgaccgaccttacgacgagccagcaacgacagagcacctgccctcaacccgacgggcctgctctacatctcgcacaattcgaatcggtaagacgacgaacgctagagctgctggcgtccctggaggcagctctcagccgagccgagaaagctgacctcacgcgacgtctgcactctgctcctccagctctagaagccttcccgatagtcgtacaagacccggacagctcggaacgcagctcctgacactccagcgtacattcctccctcaagtcgcacgcgttaaagagccaccctgcatggccgccaaagcgttcggccctccgacgtcgaccccgaccgcctccgccggcgctggccctagcaacgccgctgcgacaggcgctggggcgagcggacgaccggggacccctgctcccgtccagttagcatcagcgccctcgccaggggctgcggccgctcctggtgtcggcggcggcggcagcacgactcatgccagtcagccgcagcagccgccgacgacgatgccggcctacgatccgacgtcggctctcgcctcgatcaaccacaagattgcgctcctcgaagagcagacgcagggctttgtcgagattaatgcccggacagccgacgaggctcggcggcgggtgcgcggcgtgccgactgaggagctcgaggggcagtacattgacctcgtgcgttcgcgcctcgtgtccaagcgcttgactcgcatgctgatgcctctgctctcactcgcagtttcaagagatgaagcgccaggagcgcaaccacctcaaggagcgaagtcggctccatcgcgaaaaggtgcattttggacgggtgccgacccgtctcctgatccggcctgacgaatcaacccccttcttacctgccctgatcagaccgagctcgaagggacgctcgcacggacgacggcctcgcggaccaagatcgaggcgcgcacgcgtgatctcgcgctcgagctcaagcggctgatggacgaaaacaggcggctgacgagcttgttcgagagcgcgcgcggcgaagtctgtcttccctcctctttctaagctctggcttcgagtcactgacaaccgacttcccgccccttcagatcgaggccatcaaggaggagtttgaggcagtccggagcgagcctgcactcgccctcggccggctccggctcaaaggcccatcacccgggcctggtagcccggccgcagcagcaattcagcaaagcgccagcagcaacgctgagggtagtccagctcggcggagccctcagacctcgccccttgtagccggcgacagctccaacggcagcggcgccagccagcccacgattgggctgacggttgtctgcaaaggtcggcgcgagcacctccactttgtcctccggccgaacgagccccttcagccgctctttgacagctggtcgagccgcttcccgccgcccctcgagccgccaccgagcgcgctggctcagacgaatacctcggccgtattctcctcggttgggaaaaggggaatggccaacacaagcaagcacggccctccgccggccgacccttcgcagccgccgatcgctccccagtcgcttggccctccgtttcttttcacgtttgccggacgcgtccttgccgggactgacacgcccgaggcggtcgggctcgaagacggcgacgggctcgtcgcgatcgagattgtcgacctcgctcgcgacccagcggcggccaaggcgagcgctgccggcggggatgattcggtcgtcgtcggcaaccctctgaccaaggcggccaagaagaatgtccaggcagttcgcgcccaactcgaggccgtttttgacgacgtgtacgtccgcaacttggccctctgcgcctttcggcatcgcttgactgactcgacccgtccgaatcacttggcagcgtgcgcgagcggctcaagctcgtcttccggcagtacgagacgcgcgagcgccaatttgaggcggtcgtccggtcaaaggacctcgagatacttctcgcccgggcccgggctgagcagttagtcgctgttgtcgctatgcgcccggtgtcaatcggcttcggtcgctgacaatcgcgcgtctccatctcacccgccctccagagcccgtgcactggccggcgaggcgcaggagctgtcggacgaggttgaggagctgtcgctctcgctcgcgacgctccgctgctctcaagacgacgtgcgcccgctgtcctccgatcgattctcgacattgactgacagttgcaccttccttccctgcagttgctcggcaagctcgtctcgctcgcccgcgcaccgacgcccgagaaggccgtcagcctctcgacgctgatccgcgacgtcgtcgcccggcagcaggccgaagcgacgacggggacgaccacgatcgaacctatgccgcctgggccctcggcggccatgttcctttcgccgcccgttggctcgctgcggccgacgacgccgttcccgaggttcacaaatgccgagctcgagcaaaagctcaacccgcgtggttcgatgcggccgacgacgccgttccctgggcagttttccaaggccgagctcgagcaaaagctcgacgagctcgagaagctcgacgtcgaatgaggatgcaaagcggttttgccagcagatcgggtgcgccggaggttccgcgtttgctgccctgccccaattcccgcgaccccgcctgtcgacccgcgcagagaagctgtcagggagcggatgcagctcgaacagcatcacgagcgagcagccaccggcatccgagcagtaaagtggcgtcgtcctcaggccatctctgcgcgaacgtcgtttcgaagggacgggctcaaatgagttttcgatcgtcctgcttgctgcgtcactctgcagcgccggccggtgtgttcgcaagtggcccgcccgcccagacgagcggacccagcccgcgacgcagacgccctctcttgaagctcgagcagcagacaacgacgacgacgctcgcttctcctcttcctccatagccttcgcctcagctaggccgctctcctcttctgaccggcttgacgacgcctacgctctcgccgcctcgaccactcgccgcgcgcccgccaagagctccccgccgccgctttcgacagctcgcccaaccaacggcctcgaatctccgacctcgaccaggcttgaccccgtcgttggccgaccttcgtagctgagctccaacactagaggtcagcacctcagctcgaacttgtacggatgtcgagcgaccgctgtccctccccggcggcctgctgacgtcccgcccccttttctctcgcgtcgtcacctcaagacaggcaggcaggcgacgaccctctcgccgacgacgcacgcgcaaaagcctagccgcctgaggcccgcccgagaatgccctccaagaacaagccgagcatctggcagaagctctcgcacgcgccctcgcgctcgtacgccgatgccgcgccagcccatccaagtcgacccggccgcggaccgagcccgtacagtgcgccctcgacgtcgctgacctcgggcgcgcttgccgctgctgagaaagcccaccgcgaacagcaacgacaagcggatgctggcgagggtagcatcggtagctacgccggcgcgtcagctcgggtaggatcgacaggcccgtcgtcccgtgagccgcagccgcagcagcagcagagggcgagacggtcggccggcccgcgtaagcaaacgctccagtacaacgaggccgagtcgcgcttcatgatgatggacgacccggtcgacgagggtgccaccgagcaggatgctagcgtcggcggcggtagtgatgttggcggcggctcgacgcagtggcggcatccgagccagcgcatggcgagcatcagcgcgcgaagcgacgtcggtcccgtgtctgcagcagcgcccctcaagtcgaagcggtcgagccggcggccagtcgagcaagatgaggacggctcggccgggcgcatacaagcgtctcagccaagcttgggagaccggcgtcgggggtcggcgtcggacgtgccatcgcccatgccggcggcgacggtcatcgagcaccaccatcactactacgccgcaccggcccaatcgccgcagcaaaacggtgctccgttcgccggtccggccaccgccgtctactcgagctcgccctcgtcctcccagctcgggacgtacaaggcctcgacccctcgagcggcggccccgcagcattcgcagcagccagcggccttccaatcggccgtcgttctgccaactccaccgagctccgaactcggttcgccagcctcctcgttccccgccctcggtcggtcgctcggctctgcgctcgacaaggcgctgcttgcccctgcccggtcgaagacggccgccgccagctgggactcggacacgagcgatgatgaggccgccttttacacgccccggtcgtcgatgaactttgccgacgtcggtgcggcgccggcatcagtcgctagcgtaggcgacccgtccgtcgcgcagggcgaggcagcaccggtcgcagaggcgtccgccgccgcaacaccgaccgctggagcgcctccggaggaggcttcgggagacagcagcgacttggacgcgagtctcgaggacgagcaagttgacaaggcgcccgatatgccgcttcaggaggtcggcgcgcctgtcctgatgctccagccgccgacgccgacaacgttccctcttcatgacggcagcagccgcaggatggcctcgcctggtcaagcgcccggccaggagaagaacctcttttccgaggtctcatttcacccggcccgcgttgctgcccggcaaaagcagctggtggcggcggcgcctgccgagccgctccacatcgacacgacggccgtcgacgaggtaagggccgagtcgcctgcgccagccgactacgagtacgagtacgagtacgacgagccgcagccgcctcggccggctttcgcggcgcgtgagcggaacaacagcccttcgccgccgtcgtcgtcgccccgagcctcggcgctctacgccgacgacgacgacgcgtacagcggcgttctgctctacgcgcttcaggaggaggacgagggcccgctgccttcgcccggtctccctggcttcgagccccctcgccagtcgcagtcggcgccgaacctctcgccggcgacgactccgccgctgacggcctttgtgccgagcacgtcggccagcagcccacattcgggcctgccctcgctctcaggtctccgaccggccagcggccacggccatcgagccgagtcggtccggagcaacgtctcgtcctcgtcgcgctactcgcagacgtcatacgcctcgtacgccaacgagcgcgacgtcccgcgaccaacgatcatccctggtccgccccaggcgcccgtcccgatgccgagcaacgtctcgagcccgctctcgtcgccgatgcgcgtgacgccgccttcgagcagccattcgcgcaacccgtcgggaagtccgtcgcggagctcgtcctacctcaagagcccaacctacccctccgccgggagcgcgctcgactcgccgccgaccgcgccctcgtcgctcttctcacccgcgatctcgcaggcccgttacagcaacacgcccttcctcccccggccgacgtctgccctcatgcactcgtatgacatggccggctcgtacccctcggcgccggcctcggtcgtctcggacagcggccaccggccgcgcaaggcccaaagcagcgtcggcgacgttcgccaaacggcgcgcgagactcagccgatgagcgtcatgtcggcctcgccgtccgaggccggcgtcttccagcgcaagcgactgatgtcggagggcgcaagcctgcgcgacgtccggacgctgccccagctcatgggcgacgtcgcccgtggctacggcgggacgagcatgagcggaggcagcggctactcgtgcgtctcaagtcctcccctttcacgagtctcttgctgacccctttgctcgcgccctagatcactcactctaccctcggccgtctaccggccggccaagtcgcccgcgcgttactcgggcaaggtctcgtacgacacgatgggcatgcccgacacgacgatggcgaccatcatggtcagctcgaccgcccggcggccgacgacgccgagcctcgcgccctcgagctcgatgagctcgctcctccgtcgcaactcgacttcggcaacgccggcccacctgctaccgacgccgctcatctcggtctcgtacgcggctcacacgccgccgccaaagaagctctcgtcgacgggcgtcctcgtccggatctgggcagtcgccgtcgacggctacgatgccctcgccgcccgtgatgccgcaccgggcttcgtccccggccggagctttgtcggcaaggttgtcgaatggggcgacgcctgcgccggcatgtttacaaagggcgagtttgtctttggcctgcgcgacctcaagcgatcgggcgcgctgagcgagtttatcgtcatcgagcgccgctacctcgccaaggcgccccaggtgtcgtcgtccgggctcgacggcgacgacgaaggcctgacgctcgaagacatcgcagccctccccctgctcggcgtcaccgcccaccgggcggtcggtagtatcccccgcggctcgcgtgcgctcgtcctcctctcggccgagcctccaccagggggatcagctgcggccgagagcgccggcccgtccgactgggcggtcggggtgctcgcttgccaggagcttctcgcccggggcgtcatcgtcgtcctccaggtgacgaccgaccagggcgaggtctgggccaggcaacacatgccgaacctccgcgagggccacgtccgtgtcggtaatgcggtcgaggtcgttcactcggagcacgaggggagctttgacctcgtcctcgactgcgtcggcggccggagactctacgacgcctcgcggcgaatcctctcgaccggcgggcagtgcgtccgcgcgaaacgatttaaccgcgctaaatccagggagctgatacttgaacctttttgtctgcccaggttcaccacgctcaagggcgacgcgacgccgatcaacggcgagcacgcaatcccatcatccggctcctcgtcaaactatcgctcgctccgccgggcattcgtcaagaaggaccggaagcacgtcgactaccgcatcatctcgccctcgggctcgggcccgatcgtcgactttatgggcgaagacgtccgcgacatcctcgagtggatcagcagcgccggcgtctaccggccagtccgggtcgcgaaagtcttaccatttgagcgggcggcagaggcgtttgcggtccgaccgcggccggcagcggcgcacagcggcaagatgccggtcggccaccaaggctcgtacgagtgcgagtgccaggtttggggcatccggctcgttagctaaagcggtccttgcactcgtcctctcctcctttctctcatgcccgctcgcctcccgacgcctgcatagcacacacacacacacacgcatacgccctgcttgtaccctcatcttcctcgcgacccttaatcgttccaccatctaggccccgagtttccgtctcgtcctatctccttggcttccactctagaatgtaccgctctcaatcattataaaaatcactgttgccgaactaagcttgcagaaaagcggtcatgtgaagaagatatcgaccagccgcccagcgcttccgctcccgctggcccgccagcccgccagcctacggccggccgcccatccgcttgacgagccccttcttgagcttgtgcccgcccttgccggcgagcgagaggccgtaagggtccttgatccctcgctggtggtgatggccgtgcttcttgctgccgtcacgccgccgcttctggttgtgcgccgccggtactgcagtgtccttcttctcggccccgaagccaaaaggccgcgggccgagcccttgcggaagcgccgctcccaccgccggcgtcgaggtcgagccggtcgaggacgcggtcgagccggcggccgagctcgacggcgtcggcaggctctcgcgccgagccttcttgctcgagcgcgcgatgagcggagcgttgagcctaaggagcggagccgacgtgcttgccgttgctgctggccggccgacgtcctcctcgtcatcgtcgtcgctcgatgggtcctcgtcgtcctcgtcagggtcggacgtcgtgggaggcgacgggagcgaccggtccgcctcggccgggatttcggagatgcgccgcttcttgttgccgctcggaccgacgacggctgcggcagcagcggcgagtgcctggcggctggtggcaggcgacgacggtgcgggcgagggcatcggaccggcggctgcgacctgcgtctgctgctgtttttccggcttgttggcgaccggcgcggtggcggcagcagcggcgtggtcggccttgtcggccttgccgcccttttcgcggatgtacatcaggaggtacgcctccctgagcccgagcggcgcctggccgccagcaagcggatagacgctcgagtcgtccatcacataccaacccttgccgtccgtgctctggacgcggctcgtgtagtgcccgctgtgcgggcctgagcccgagtggcagacgacggcgtagagcgagtagcgcccgccggacgagccggctgccatgtagggcgagatgtcgaacgtccggtcgtacgagacggcgtcgttgagcttgccgccggtcggcgtaaagcgccggagctggaccatgagcgcctgaggggcctgggtgatcgagaggcccttcgaggcgacgacgagcttgttgcacctgacgaagaagcagatgcgcgggtgtcagcccgatcaagctttcgcgacgactcccccattgtgcccggcgggcgttgactcacttctcgcacttgtacttgttctggccatcgagcatgtcgggcttgacgaacttttcaaagccggccttgatcgaccggcagccgcggacctcgatcgagaggtcgaggaatgcgtcgtacgtgtccgagttgtgcttgcagcgcgagcaggcgacgcgcgagcggagctggccaccaaacagctggtgaataccggtcgtgtacttgagctcggccgggagtttgctggcgaggtgagaggaagcgtgtcagctgacgaaggcacgctcgaacagcgtgggacggagccgcactttgggtcgccgaacgggaagagggcggcattctggaggccgtcaatcaggaagcgcaaaaactcgtgggcatcctcctgccggcccttccggagcgtcttgccaatcttcttgaggttatttgtgacgaccgtcggcgtgtaggccgtctttccgagctggaacgagttgtggacgaccatccggagcgcgcagtgctggcagtggccctcaaactttttgctctttgcgaccgggcagacgccgccgggccggtgggacgggtcgtagaggtagtgagcgaagccgggcgtgtggatgacggcttgcaggacagagttggcgtagcacgagttgccggtgttgtgcaggcccgagccgatccgctgcttctgaacggggaagtcgagcgggatccgaggggggtaaatgaccttgcctttgccctttgcggcggcacggatactgctggtgccggcggtggaggacgaggcgacgggctgctcgcgcgcgtgtagctggcgacgaggaagtcacgacccgtcagccctctcccagtgagctcgacaacagtctcatctgaccgcggacgagacacggagcgagcgcaaaactcacgtgatcgtttgcacccttctggagcttgccagcaggagcagcgacctttgcctttgcgccgctgctccccggcagagggttgacctcgagccagcccttgccggccgggtcgacggtgccgacgagcgccggtgcctcgcggaactggaccgggtcgtcgagcatcgcttttaggagcgtgctgtcggccgagcggatcgcggccggcgtgaacgggttgaaggggatggcagcggcggcggcggtcatggctggtggatgacgcgacgacggccgaggaggagaggacgaggaggcgcgccgggtggcgacgaggacggttgctgctactgctgctactggaccggtgggcggcgagagcgaaaggtaagctgctgcgagggcgaatgcaatggtccgacgagctggcagagtgggcgagtgctggtgcccgaggagtaacgttgctgggctggctgctctcgtcgtcgtctctcgccctgggcagcctgcgcgccgccccgaaaatcgaagcgagagggcgggcgaggccgcgcgcgcgagagaaatccaaaaggggtcggccggacgacgacgacgacgacgagcccgacctcgtctccctctctctcgccctcatcattcacgaacgcctgcaacgatggacaccgcaccctcgaccgtctcggagccgctcgatctcgtcaagctttcgctttccgagcgcgtccaggtcaagctcaggggcgaccgctcgctctctggcatcctccatgtccgtccctctcacctccttcgcctgcccccgcactcgaactgattcgctcgctcgcgcgcttgctgctcctgctcgacgccaggcctacgacaaccacatgaacctcatcatgtcggatgtcgttgagacggtgacgattgtcgacgtcgacgagacgacgggcagcgagagcctccgggtcagtcgctctctctctcttacgcgccctttcgcacgctcggccgagggggaacgggctggaggcggtgtcggcgctcgggacgagcgacatgcgccgttggacgaaaagttcagtcggactctgctgctcgagaagtgagagaggcaagggcgacgcttgactccgagctgctcgacatgccatcacgcgtaaaggcgagcgctgactactgacctgacctgcctgcctttcctgcatcctctcttattgcccttctcctccctcttcttacttcgcacgcgcatactcgattgctcatcgacgatcatgttgaaaacagacggcccagcgctcggtcgagatgctctttgtccggggcgacggcgtcatcctcgtacgtggaccccctttcctcggcctcagactctacgctactgtttcggattttgaagatgatacccttggggggggggcccctttgatcgcgacccctcgtcctctcctatagagcccgccggacgaccattgccacctcgaccccggcttcgaacgcgccctcttcagcagccgacgtcaagggcaaaggccgtgctcagacctcgccctcgccgtccctctcaccgccgcccgccctcaccgacgaggaggaagccgccgagctcgccctccagcagcagcagcagcagcagtcaccgccggcccgcaaacgagcctactccctccgttcggccacctcgaccgcagccgctcctcccaaggtcgcacccactagctcctcgtcgcgcaaaggcaaaggtcgcgccgtcgccgcgccagagttcaagaagcccctcccgccaaagaagatgcctcgcaaggcccggtccgtcctcgcttgtcgcgctgccgaaagtgggtacgcgcttgtgctgacctgctcccctcacttgcctgcagcacctcgaccggaggcaaagacaagaagccggcgacctctgccccagccggcagcacacgcgtctccaagggcaattcgtcgaccggctcgtcgcgcgccggcaagcgtctctatggtgacgacgacgacgacggtgacgacgccatgatgtcggaagacgactacccaggcgaggggtcgacggacgacgatggtgccgccgccgctgcgaagcctgccggcgacgaggctggtgcggccgatgcgactcgcgtcaagaccgaggccggcgcgagtgaccctggcgggacgcttgcgcgtgcgctcgccaacgccggcgtcggcggctcgagcgccgccagcctcgacgccctccgcgcaatgtacgactcgttcggcctcggcggcggaggaggtggatcgggcaactccgcggccgccaaccggtttgccgaatcgcttgcccagtcgatgtttgcagatccgtacggcggcggcggcggcggtggcctgttcggccgaccgtcgggcggccagcaggcgcgcatgcggacgatgctgcagggcctccggagcaagagcatgtcgacccagctggcggccctccaggaggcgagcgaattcctctcgatctcgaccgaggatacgctttcgggctactttgacctcgacggcttcattaaggagttcatccggatcctcaagggcctgccctacgtcgcgcccggcggtgctggggccgaatcggccatcgcagcaccgtctgctgctgctgctgctgctgccgttccgcccaagacgacggccggagatgacggcgacgcccatccgcatcggtccgacggcgaagacgaccacgagcaagacagtgacgacgacgacgacgacgacgacgacgagtcggacggcgtcgacgaaggcgcgggcgcaggtggcgaggccaaccctctcggacacgacggcggcggcggcgcgcacgactttggcggcgagatgatggacaacgacaactttgaggacgccgagctcatgcgcatcctcgcgctgagcgcgcaggaggcccggcaggccgagcaggctgctggcggttctggcgctggtgctgccgcggccgcctccgccccgatcgagccagtagcatcgtattcggctggcgcgttcggcatgatggacgaagagccgtcggcggacaagctcgaggcccagctgctcgcctgcaggtgccttgccaacctgatggaggccttgccgggaagcgctcacacggtcgtctcgcatggagcggtgccggtcctctgcgccaagctgctcgagatccagtacattgatctggctgagcagacgctgagcgtacgtccgccctgacgatcgcctccccttcgacattcacctgacgccttcgccctcccgacagacgatggagaagatctcgcaggagtacccgctcgcgatcgtccgcgagggcggcctcggcgcgctcctcaactacctcgactttttctcgaccaacgtccagcggacggccgtcacggccgcggccaactgctgccgcaacgtctcgcaagagcactttcagatggtccgcgacgtctttccgatgctccgcaacgtcctcgcctacccggaccagaggctcgtcgagcaggcctcgctcgccgtcctccgcgcggtcgagtcgtaccggcacaagcccgagtttctcgagacgctcctcgacgtcgacatggtccgcgcgctgaacagcctgctgatgccggcgaccggcgcatcgctcctctcgccggcgacctacacgcatatgctccgcgcgctcagcggcgccgccaaggtctcggccaaagtgacggtcgcctttcttgaggccggcatggtcgacacgatctaccagattcttaccggcgtcatcccaggcgcgcatgaggctgacgagcaaggcgcgagcgaggccggccagggactcggcggcggtctcaaggacatggtcgtcctccagaacctcgcgcaccggccaaaggaccagatcgaggagacgctcagcctcatctgcgagctcctcccgccgctcgcgaagggtgcgttcctagcggtaattccgaggcctcgtccagttgtccggtaaagctgatcttgacccttttctcccagacggcgtcttcgacccacggtcgtacactgagaaggcggtcgcacggctcgtcaaggccaaagcgaaggctcagcgggccgccgctcgtgcccaggcggcggccgaccctagctcgtcgaccgcgctcgacacgccgtcaggcctagagtcgcctgcgactggcactgccgaggaccggccggctatctcgaccgccaacagcaccgacgacgtctcgggtgccgccgccgtcgacgacgtcctcagcgcctcgacccggagccgcaacaaggaggccgaccaggtgctcgagcgccggctcagcctcctcaaggagcaccccgagctcgtccggcgatttgtcgggctcatcatccccgtcctcgtcgacgtctatgcggcaacggtcgcgctcaaggtccggacaaaggtcctgacggccttgctcaagacggtcggttatctcgcgcccgacgagctccgtgaggtcttgcagacggtcccgctcgccagcctgcttggctccatcatgtcgtcgcgcgacaacccagccctgacgctcggcacgctccagctgattgaacttctcagcaacaagctgcccgacgtctacaagacgggcttccgccgcgagggcgtcatgttcgaagtcgaggcgctcgccgatgaggagctgacgacagcgaaggtagcgagcaagcggtcgaccgtcagtgcgacttcctcaacgacgacgacgcccgctgcggccgtcgtcaagagcgagccactggagacgccgacgctcgcgacgctgtcgtcgctcctcgacgcggcggccgtcgcaggcagcaatgcagacgctccgatggacggcgcgctcagcgtcggtggccggcgggcgagcactggctttggcgctggctccctcttccttcctagcggcggatcgagcagcaagcggctgtcgtcgctcccgctcgaccccaaggacgccaacatccttcgcgcccgggtccttcgcttccaggccgaggccgagagcgccgccggccaggaggacgcggcagcccggtcgctgacccacatgcaggacctcgtcagccggctcaacaacgaggacgccggcgaggacgagcttcgggccgtcatgaccgagcttgcggccctctttaccggcgctgacggcggtgtctcgagctttgagctcctcaagggcggcctcgtcgacggcctgctcgagtgctcgaccatcaatggcaaaggtacgtctcgagtcgagctgcttcgagcaactgagcgttccgacgctgaccccttttgacccccgcagcctcggccgccctccggcggcggctcctctttgaggtcttcagcaagaccgagtcggacgccgctggctctccgtttgcggtcctcgtcaagcgcctgcaggagagcctcagccggatggagacgtttgaggtgacgacggcttacgccggcagcgctgcggatggtgcgtcgctctcgccacgtcgcaagacggcccaggctgacgccgccttcccgctccgttgcgcagactcgcgtcgatcgtcgacggccctgctcgctcggcagatccgtctcaagctggtcgccgaggaggggtccgacgtccccaaggcgtgccaggcgatggtcgtctcgatccaggcgattgcgacgctccaggcgctcaacgactacctccggccgaggctgacgggtccgcaggttagcgcgggcaggcttccgggtatgtacgccgcccttgctgctgcaaccgatgccctcgccagcgcgcggtctcaacaggcactcccgtcgtctgcaacagatcaagcctctgcccctggcgccgccgctgccggctcgtcctcgacgggcgccaatgccgcgaccgagtcttccactgctgcgaacgacaagaagccgctgacacgccggcgcagcgcccggctcagcggcaagggtcccgatgagggcgccgcagcgactgacggatcggcagaggcctcgacctcgtcagcaccggcggctgccgctgccgctgcgacagacggcgaggtcggcacgcctccgcagtcggcgacgctcgcccagatggcactcgcgctcggaatggccgactttgacgacgggtacgacgatgaggacggctactcggatgacggctacgacgaggacgttcgtcgccctagtctaatcctgttcttctctgcgctcgctgacctttgccgcggctcttacagatgttcgacggcgagatggacgacctgccgcggcctgcggagaagacggtcgacgtaacggtgaccgagggtccgtctctgacgtcgctgactggtgcccgaggcgactgagctaacccgcgatctctgtccctcctagacggctcaaaggtcgtcgcgcagacgccgaacggctcgcgcgtcgagacgcccgttcaggcggccgaggccaacgccgaagcgggtccttcgcgaggggccgatggcggtgcgcgcggctcttcttacgcaacggcgctcaagacgtcgccaaccgactggcatctcgccttttcgatggacggcaggccgctgccgctcgagacaaccgtctatggtgccgttcaccggcacgagagcacgattggcatcgtcaatggcgtccagcgcggcatctggtcgggcatctacccgatcgccttcaagaaggtcgccggcccggccccgacggctggtacgttctcctccttctcgcggtcggctcttggcggcccgcgaaactgcctgacgcgacctctccccccctttgtagacgccaacaaggcgcccgagctctcgacgcgagacccatcgtcggcgacggccgtgcccgactctgtcccgcccgactcggcccaggccaagattcttcggcttctgcgcgtcctgcacgccctcaacgccgatgcccggtcgacgagcctcgtcccggcgacgctgattggcgagacggccttcgtcaacaacaagctgacggccaagctcggccgccagctcgaggagccgatgatcctggcgaggtgcgcggccattcttgttgcgcctgcctgagcgagcgagtgagttgacgacctgcccgttgctccctcagctcgtgccttcccgactgggcctcgaagctgccgcggatcttccccttcctcttcccgtttgagacacgcttcagcttcctcaaccttacttcgtttggctacgcccgcctgattcagaagtggcagtcgcagcaggagcgcggcaacgaccaccgaaccgaggacgcgctcggcttcctctcgcgcctcccgcgccagaaagtccgcatctcgcgcaaccacctgctcgagtcggccgtaaaggtgttcgagctctacggaacgacgacgtcgatcctcgagatcgagtactttgaggaggtcgggaccggcctcgggccgacgctcgagttttatgcgatcgcctcaaaggagttcggccggcgcgacctccggctctggcgcgacgctgactcagccggcaccggcgactatgtccaccggccgcagggcttcttcccggccccggcggcggtcgacgacgaggtcttcgccggcacgacccgcgtcaagtttttccggatcctcggccagtttgttgccaaggccctgctcgacagccgcatcgtcgacatggccttcaactcagtcttcctccggcacgtcctcggcgacgagattgtcccctcgatccagatcctccgggtccgtccatcccctccccatccttcggcgtctcagctgacgtctcatacctctctcgcgtacagctcgtcgacatccgctcggccaaatcgctcgacctcgtccagcagtttgccgacgccaagcagagcatcgtctttgacgacgaggcgaccgaggccgagcgacgggcggcctttgacgacgtcaccgtcaacggcgtcgcgctcggcgacctctcgctcgacttcaccctcctcgggaccgacatcgagctcaaggccggcggcggcgacctcgcggtcgacatgggcaacgtcgaggagtacattgagctcggtgcgtccctgcccaacccgcgttgagagctctgaagcagcagacgatttacgaccgtccactccctctcagtgctcgactggacgctcgtcaagggcgtcaaggcccaggtcgaggccttccgggccggcttttcgaccatcttccccgtcaacgacctccgggccttctcggccgaggagctcgtcgtcctctttggcaacgcggtcgaagactggtcggccgagacgctcgccgaggtcctcaaggccgaccacggctacaactcggagtcgggctcgatcgccaacttgatcgaggtcatggccgcctacgacgccgaggagcgccgcgagtacctccagtttgtgacgggcgcgcccaagctgccgatcggaggtgcgtcctggtgtggcggtctcagccttgctcctccgtcccgcagctgaccggcccctggccgtgtccctcgcaggcttccgcggcctcaacccgccgctaacggtcgtccgcaagggccacgaggtgccgttcaaggctgacgactacctgccctcggtcatgacctgcgttaacgtccgtcccccgctctttcctccgttgcatccgcgcgcgctgaccgtctgtcgccaccgcctcgcgccccccgcagtacctcaagctgcccgactactcgacgcgcgaggtcctcgccaacaagctccggacagctatgcaggagggcggccacgcctttcacctgtcgtaggctgcggcgggcgacccgcaaggctggaacctggccctcggcgacccgaaccgctggccggagcccaccttgctctgctggcctcctccccccttctcgatctccttcgccttccgccgcgccacgccactagagtcccttctcacgtcgctctcctctcccatcacgacctctcacccttcctgcaaacgacacaagcacacctcttcctgcgtctctcactatgaagcctcccttctctcccttttttgtgaaccttctgcgtctgcggcggccgatggcggggaccccttggcttggtctctcaccggcgtaactcgccgtaagtctgggcgtcaaagacacgctcccgcgcgcgcccctctccctcgtcgcccctccgaccgagcgctgtcctgccaccgaccgacccccccctcctcgttccgcaactcttctgctgccagaccagtgcaagacatctcgagcaggtccgcctcgcccgctgacaagccggggaatcaaggaagccgcagccaggtgcgtcgccccttcctctcttttccccagcgacggcggcctctcttttggctctctcctcgggcgcgcgagcgcagcagcaaagccgggcagctcgtcctcgtgctcgggctctcccttttatgcctagcagaaggggagacggcagcgagaggagcacgaggtggtcgtgcccccagacgaatggtcatcgctggtcttgaggaggggaaggcagcaggccagcccctcgggctcgccgaccagtcgccaggcagcggctgccgccgagaagccggcagggcggacgggtcttgggccgctcgtcgataaaaggcctggcagaacaacaggtggcagaggtcgtccttcaaggcgggctgccaggtcatccgcaggctatgctacggtgaagtacggcggcgtcctgaccagccttcgtccccttgccggtgctcgtgtcagccagccatctcgctgccctcgtgcgcgccctctcctctgcctcaaccgcacgcccataccctctccctcccttcaccttccgggcatcctcaagcaaccgcgtctcctttccgagccacgtctgagcttcaaagtgcaccgcagtgctctcggccgactgctcgcgcctcgactccggccttcgttttcgccacccgatgcctagtccgacagcgctgtcgatcagcatcccttcgccgccgtcggtcggcgccgtcctgccggcgatgccccagacgtcgtccgagattgagcgcgagctttcgtctgtccgctcgctccgccggaggtcgggctcgggctcgggcaccggctcgctcggcgcctttgacccagacctgccgccgacgagggacgacctcaagctcgcgacgggcctcggaatggcccttccggggacgagcttgagcccgacgcggacctcgcccgtcggtggtgatggcagcggaagtcatggctacagcagccggtctggctcctcgcctgttgatcgccgggctggccggtcgttcgcaggtcctgcgaccgacgacgacgacgacgaggcggcggaccgggacgcccagctcttctgggtgccggcccatctgcaccctgagctcgcgccgtccgagttccgggcgttcctgaaggagcacacccacgcccatgcccaagaggccgaggaggccgaggtctcgccgccgggcgctttcccgacgtcgtctgcctcatcgtccagttccgcctcgtcttccttgccctttggttcgcccgtccagcgggcatcgtcgctctcgcgcaagcggtcgatgctctcacggcagtaccagccgcgggcgaatgatggcgttgatgctgagccgccggcgctgccgattcggcgcgtctcgcatcggtcgaaccggacaagcatctacgccagcccgtttgcgaccgacgaggagcccggcgtcagcctgatggacctccagaagctcgaggagatggccgacgaggcggcaaagagcgatgacccgagcgcactccgcagcctgctcaagcgcagctggagcgtcaacactggctcaagtcgtgagtcgtcgtccttgttgaccgtcagagtggcttggctggttaacagacgcctttctctctctttgcagccaacgctgatgcgatcgacggcgtcgccctcgccaatgactacgactcgccagttatgccgatccgccctgggacgggctcactcatccggcgcggcgcgcggaccaagatccgtaaggccggcatggacggcgacgcccctcaccgcttcggcccctcgcgtcgaggcaagggcccgctcgtcgacgaaattccggcgctgacggctgacgaccagccgctgcacggctaccggacgccttcggacgaggaccacgcgcgcgacgagcggccagtgtcgacggcctcgctcgacgccggcggcatctacgactcgtacctgaactcgcgcgactcgatggtcgccccaccctcaggcctgagcaacgacctcggcgccgctcagcagcgtgagccgagcgagtcgccctcgccgcccgacctcggcatgtcaatcagcctgccggcgctcaagattgaagagccattcgagccattctcgctctcggcctcgtcggcctcgtcgtcgtcgtcgcactcgcacgaggaggaggagccctcgagcccgccgacgccgacgcaggagcagtaccggccgtcggtctacattccgacctcgccgagcgagagctcgctcgtcttgtcgaccgagcgcatctcgcccccgccgtcgcccgaaccggccggccaggcgacctcggcggcgtctcacttctcctcatccgacgctcagcagatccggcggaccgacagcgccggcagcctggcctcgagcgccggctcgagcgtggccagcaaggaaaagaagaagaagggcttcttctccaagaaggacaaggacgacaagaaggagaagaaggtgcgttcgcggctcgcggaggcacgccaagacttttgagctgacttctcacccttcattccgaaccccagccctacggcgagaaggagaaaaagggcttctcgctctttggcggcaagaagaagcacgaggagccgccgtcgccggtcaacgtcaccgacggccggctcgccgctgcggccttgctcaagacgaagcggccatcgtcgcccggcgggcccggctcgcccgcgccgcccgcggcactcggcgcgtcgaccaactttgcgcgctacccgatccacgtcgagcgggccgtctacaggctcagccacatcaaactcgccaacccccgccggccgctctacgagcaggtcctgatctcgaacctcatgttctggtacctctcaatcatcaacaagaaggatgacgacaaggacaagaaggcggccgctgcgaaggagcagggcgaggccgaggccgagaaggccaaggctggtaatggcggccaggcgatgggcaagggcacacccccgggccattcgaccgcccgcgacatcctcaacgggaccgtcgcaccgcagccgcctgctgccgtccggcggccgtcgaacccgcggtcggatgatgcgcagctcgctgctcagaagccgccgctcgtccggagcgccgagcagggcgtccgggcgccacagtacggctcccaggcggcgcaggagcagcatctggcccgcggaccgccgccgccgtctagtcagcacgccggtccgcctcgtggcgactctcggccgtccccgccgccgagcgcccaacatccacctcagatgcgaccacctccccaggctggccagcagcggcccggccaggactacccgcaggatcgtccagagcagggccggccgcagccgatgtcgagccacggcggccccgcaggacccaacgcccctcatccgaatggccgccctcagccaccgcctccgcagcagcagcagcagcaacagcagcaggcacggccaccgaatgcgccgggctacgatctgcgtgtcggccagccgatcgtctcgccgggcggtcctcggtcgcccgggccaacgcaggctcgctcgccgccccctcagggtggccgaccgctgcaggccccgccgcagccgccctccttgcagatcaacgtccgtcctccgctgccgtcaaacggcccttcgcctccgccaggccagcagatggcccgctccccggtcaacggacctccgcccggcggtcagccctttcctggccagcagcctgcgcggcgggcggccagcgactcgcacgcgtccgagagccaaggcccgccgtacccgggagggccacctcgccagccaccgtcgccaaactctcccgtccgggagcggtcgcacagcacgagctcgcctcagccgggtcagatctttcgtccgccgccaggaagcatgccgagccccagcggcgggcctaggccgggcgaggtcttcaacccgaatgcgctgcctcagattggccaggtcttccaccacccgggctaccggccagcgccgtaccgaccaggagccctccctggaggcggtccccctcctgctggctacccgcagcagggccctccgcctggtcagccgccgcagcagcagcgcggtcctccgcccgcaggctactacccgccccaacagcagcccgtccaaggccggccgccttacccaggagggacgcccccgccgcagggctacgccggtccgccaaaccccaacatgcggccgcctccgccgcagggtcagggctatcctcagcagcaacagcgaccgccgccacctgccggctactacggtccgccgccaaacggccagcagcgccagctcccacatggccagggcccgccgcctgggcatcccaactacggtctcgccccgcagcaccactacccggcgccgatgcagggccagcgccggacgagcaatcaaggcgaggttgtcgacccgcgcgtgcgctgaggcccgccctctggccgggccggcccccgcctgtcttccctccttctgctgtcttgcttcctccgcttcttcttccctcgtacgcaacctctctctctcttccgctctgtctaaacgcaaacctcctcccgcctcctgcacgcaagcgcaagccgctcttcgcctcccaccgtcgtttctctctcgctcccatgccttcgcccctgctgctcaggtcgcgactcttctagacggctcccttctccatttcaggacgctctcacaaagacgatgctggtccggccctcttccccccccccaaatcttcgaatgcccacctttcgacacgccagcggcccagggaaggtcatcagtcgtaagagggcgcccgcgcccgaaatggtgttgtcgggaagaggatcgtccgtcaaacccagcgattgctgccgagcttgccgacgccgacgagcacggcgacaagcacgacggcgagccagcttaagctgcccaagcctcctttctgcccttcctggacgcccgctgccggccctcctaatgccggagcagccgtctcgaccccgcctctaccctccgcaccgccgtcagctggctgagctactgctgcggactccgagtcgggcagagcgacaatgttgaggttaaagcggccggtcgcggggtcgacgagggcaaccggaggcgaggcggcggaggaagtggacgaggcgggcaaaggggatgagcgcgccgtggccgacgaggatggaagcgaggaagggctgctgactgaggaagcggcctgcgacgtcgtcgacgccttgggcgcaggcgtaaacatgtcgggcaccggcttcatctcctttccggcgtactgcggacgaaagaggggcaagtgagagtcagcttccgctgcgggcatcagcctgaccaccgagagtggacacgcgggggtacgcacgtcgggaaagttgtcgcgaaacttcttgttgccgatgttgaaagcgtgactcttctcggcgagcagcttgcggtcggccgccgtcgccgtcgtggagcccgtcgtgatctcgtcggagagcatgaacgacagcaggccggtcaggatcgtcgcgaccgaccaggctgggttccaggtcgacgggtggaacgacgtcatcgacgtgcaaatcttggtttcgggcttgaaccggcccgagggcgtgaagagcttgatgtccggcggcttgaaagggtagtcgccttgcaggggacgaaagagtgacaaggtcagccttgaaggcacggtttgacggggctagggctgggccggctgcggaggagaggcgtgccggcctgctccaagccagcgagagaaggtggaacgcaccagggaacatgatcaggccatggtactcgccgccctcgtaaacgctctctggagggccgcgctgtggtcgagcaagaagagcagttgaggtcagcaaggagggtcggagcatcgcctaagctgccgagctcggggcacggccggcacagactcaccaggatgaagtgccctgtcgcatgaggacgttgcgctcacaagtcagctccattgtactcctcacgcctccctttcggacgacttacagtggaggatgttctgctcagccggcccagcaagggaggatagcgcgtcagcccgggccgctcgactcggggagccggccgaggtagagacgcaccttctcttcgggcgtcgcccagcagaaaggcggcggtgccttctgcatcgcctggaactctttcgagagccgcttgcgtgcggccggggaggccatgttggagaggaggaggacggaagggtgagttgtggtcgggcgacaggatggccgagcttcgagtcgtcgcccgcagctgtcggtctgttcacctccaacgtcgatgggctcctccttcgactcaccctcgcgagctctttagcaggacggtcaagtcaagatgctgccgacgctcatcaagctcgtcaaaacgcgtgccgttgccgagcttgtgcgccagcggatcatcggcggtatggtcggccgacctcggccatcgctcctcgacctcgagcgtacgcccccgagccaaaccgtcccccggcactgatcaacgtcacgactgacagagacctacatctcgatgaatcaacaggcgactatgtggccaacactacgtctgtcattccagaaattgaccgtaagtgcaggtcgggacaagcactcattctcaccgaaggcagcgctaaccgacggtactggcgctcctcgctcgacgtgcgccctccagggatggagcttgaacctccctccgaaagcgaggccgctttcgacagtgctggcgaggcacccagggcgccagtcggcggcagggcggcgcccctgatgctgaagagccgaacggaagacttttgggacggcctcttggaaccgctcggggcaaaccccgtcaaatcggactttgagatgcctcgcaaggaccgcaacggcatgacgagcgacacctgagcgcactcgcagcttgcaggcatacccgtcatagggtcagtgactcgtgtcatcgccttcgcaactgagatttgatcctgactgacgcgctgcgtgtcccacccgtcgacaggcgcaagcccctcgactggctcctggcgtcttcacccgctgggtaccctaagcgagccctccctcacccttcctcaggggcgggacgacctcgcgagtcggcctggtcgagtcgcaggcgacgggacggccgagccgtgccgacgacaggctgcgcatcgttctgtccgccagaggcacggccgcgaagtaggagggtcattatggaggccatgtgtcgcggcgaataaagtgggtgtgtgcgagtccttgagcagtcggcaggggatgcaacgtgtggtcgggaggcgaaggagagggagaagggtggctgactggagcgctcgtcaccggctgcgctacgctaagcagagctcgtgggcgagtctgaacgacagcagttgtgctgcaggagaaggaggtggcttggtcagcgtctgggctcttcccttagctcagtgtctctctcgcgacccgacgtacaggagcgttggcgctgcaacggacatggacgacagctgcgagagggaaggcaggatgtcagctggtcacccagtcgctccgaaggagtgagcgctactgacagttgcagtcgtcgcaacgcaagtgagcgccggcacccttgaccttgaagcggcagacctcgcactttggcagcttggccttcttcttgctggccttgccgccgccagacgatgcgccgccggacgagctattgccgccgctgctcgtcgtcaagccggcggccgagaaggcccagccgatgaggctttgggcttgcgacgaacccttgcgggcgggagcagcaggcggcttgttaagcgcgccaatcggcttgacaatcgtaaagcggtgggtgaaggccgacggcgggaaaatgggcgaggtgacgggcgaggcgagcgttgccggggtgatcttagtcggcgagagcgggcgtgggtcgatggcaagcatcgtcggcgacttgggttccgtgaccgtcgtctcgagcttgtcagtgggaggtgcgtctgacttctcctcggctgcgcccttgaccgtgcgcacggatgaggtcgcgcccgactcgtcaccctcggatccatggtgcggaaggttgtcggtcgacggtcggttcatcacgactgtcgccgtcgactcaagatcggatggaggaccgctcgagtcggcactggtcgtctcggataggagatggtcgtgcgctaagaggcaaggtgtcggtcgtcagccatctgctctcgacctcaacaacaagagtaggcacgcacctcgcatctcggatgcgtcggcgtaggttgtaaagccgctcgagccggtaccgggctgacgctcgccatcctcgccccagcgggccgtgcgccaggtaccgccctcgacggtcagggcgccgccgcccttcttgccgagcgagtcgagaatctccttgaggtcctcgacgtcgatgtcgccctcgtcgccgctgctcgtcccatcctcccccccgtggtcgacgcgcggcggctgccggccgcccatggccgaggacgacgagcggatgtccctgccgacaccctggccgaaggacggaatgcggccaaagttcggccggccgcctcctcctccacctgcagggacgagcttgagcgagccgacatgctcgccagacccactcgaaagggcgagcaccttgagctcgatcgtccggagccgggtaaggacgtcgcccatctttggccgggcggccgggttgacgtttgcgcagtcgagcgcgagcgcgatgaacgctggcgggcatccgggcgacgccagtcgacggacctcggatgcgtcgagcccgaaggaaggtatctcgcgctgtaaagggaaaggggagaagagtcagcatgaatgagaagcgctgctcggaaaggctgacgcaccttgaacgtgttggcgtcgacgagcttgcgcgagaggatctcgcagaactgcagagttaagctggtcagccacggggcgtgaagcgccagcgagtctcttaacctacgcacgatgatgccgagcgaaaatacgtcggtcggcaggtcaaaatcgacgcccataaggatctctggcgacatctgccggtgagacggtaccctgcgtcagtctgaatcgaacagacgagggtgcatgataagctcacgtagccgtccgtgccacagaacgacatgcgccgcatctcgtcctcgttccgcgcggcgatccgtgcaaagcctgacaaagcgcggcagaggtcagcgcgcgaggacttgcgcggctgatgggaaggcaatccacgcaccaaagtctgtcatcttgaggcgttcgttggcggttatgaggatgttctcgcccttgaggtcgcggtggatgcactaccggcgacaagttgtcagttgatggaagcaacgagggccagccgaatcgatggggtcgaccgaccttgcgggcgtgcaagtaggcgagcgcacgggcaatgtcggtcgcaaagcttagccggagccgccaggggaaggtcgggtgggtacgtttgtcccagatgtacgagcggagattgcctgcgttcgggagagggggtcaaagtcagagaacggacgacaaggaatgctctgaggcaaggctgaccgttgtcgatgaactcagagatgatgctgcgagaggggcggggctgggtcagcaggacgtcgataattgacgggcgcacagacaaacaagatgcggccgtcgggtggcggagcccgtgagaggccaaggtactgcagcggagagtgtaacgtcagttatgggacgcggtgctgatcaagcgcaaggcgacagacctggacgacgttcggatgccgagcctcgctaaaggatgtcataggcgatcgctggtcagccgcttgcgtctctgagggcgcgacccagggctgagacgcaccgcataatccgccactcgcgctcaaagtacttggcgacctcgtagtcggtcgaggggaggacctgcaggtgggtcgagggaggaagaggtcagccatcaacggtcggtcgctcgaagcccgacaggacaggagagggatgcggccgcacctccttgatagcgatatcgatgccgaggtacgtccctacggtcgagcgacgggacagggaagggagggaaagccatagtcagtcagctgctccagatgacggaggggagcggcagccggccggtcgaacccttcatgacgacaccgaacgagccctggccgagcttctcgccccagacaagctggtcgtacgggatggcgtcccactcggccattgttcagaaattaggcgaggaggtgctgcttggggtcgggtgggctgagctgctcgagggtgagggctgaggagggctgggtttgtgaaggtggtggtcgagctcaccccggagtctctgcccttccttctcgcgcttagcccaggcccgcgattcgatcgaacccggcgtgcgtcacgctgtgaaaggagagggtcggtgccttgagagcacctcctctctgcgggaccgcgcgagagggggctggttgcggcgggaagaagggggctggctagctcctgttcgacagcgagctgctacggccagcgcaggtagaagcacgtcgtcaaggacgacaatcagcatctagctaccttctggtagctgatctgccctcccttcaggagctgagcaggtagagcaggggagggagagcggtcgagcgacagggggaaagccatcgtgacggcggccggtcgcacaagatcgactgcgcgcgagcccgccaccgccgacgcatctcctgtcgccctgaactcaggtctccctccctttacgaggtcgcctaggcagcagtcatagatagcatcttagcaagaggtctggatggaggcgagcgcaggcatcgagtagtaggcggaggatcgtaggcggagcgagcttacagactgacggcctgcccagccccgactatggcctgcgcctgctgacgatgccctctgcagcccactccatcgcagcagctcaagtagcgaagcagacaaggggggaagggcgacattgagataggacgcagccgcggcatggccaacgttggatggcgacgactggcggcgacactctaccggcgcgcgagggcgccggcgatacgagtggcagccgccctgcaagaggggttcgtttgattgttggtctaggagcgacaggagaggcaggtcagtcgtcggtcgtgcgaagggcgagcagagaaaggacgtacgttgccacgatgggcggtagcccggccgactctgcccagtcaggcaagagacggccgggcggcggttgccacgatgggcggttgcttgccacgatgggcggttgcgaagaagctcaacaaagaggttcgctgccagcggtccatgctagagagaggagtgaagagaggagggcgggaaggaaagtcagcgtccgggcgttgagacgggggaaggagcaagaggagaggaggacgtacgaaaggaaccgcgagaaggtgtccgactcacagccgactgacgtcgggctcgacgaggcgaggcccggagactgcccggaggcgagagccacgagagggctgagcgtcgcagaggacgagatgccatggaggcagagaagccgcgagagagctggaagagggccaagagagggcccgaggatgacgcgagaaggcaaggtgcgtcacgaccggacgacgattaccgcttccccgaaccgcgagggagggggccgcccgactcgaagcggatcgacgacgggagacaacgagggaggcggttcgaccggcggcctcttgtcacgccggcgccggcgagctagcccgcgtgagcgcattggccgaccctcctcgcttgcatccaggccactccctcgtgtcaaagaactcatgcgtcatcacttctcgttgcagggacaaatgggacagacagaggaggggctaccactcgccgagctcgttccacggccggccatcctcgcccgggccgagcgcaaatgcccagccgccagcaccaaagcgccggtactcagcgagcgcgagcccgcccgcctttgccccagacccactcgccgtccggcggtcgtgcgacgtcctcgcgcctccaagcccggtcgtatgcctctcttcgtcgtcgtccgagcctgtacgtgcgccgccttcggacgaggatccgccggcggtgagggactcgcttccggcgagcgtcgatgaaggcagggccagccggtagaagccgcccgagaacgtcagcgcgacgagctgcgactccgtctgccggcctgcagagccggcggtcggtccacccgaggtcgcgctggagacacgatgcggtgcggatggccgatcgtgatgggtccggaagccgctggagccgccgccggtcccgctcccgctcccgacggctgcaggcaagtgaggcctccgtccaaccgtaggctcaatgtcgcgtcgatgcgatgtgtgcagcgccccggctgctcgtgcccggacacccgcgctgccagaggagatgacgacgggcggagccggccgcgggagggatgacggatgcagagcgcggtcggccatgacgcctccgtcgcggtcgtccgacccagagtcgtccttgccgcgctggcgccgcttgacatgaaccttggcctgcgtcgctcgccgagcgtgagcagggccgtgcttcctcgctcggagccgggcctgctcacgctcgacgtcaacctcgacccaggcgaggacgcagtgctcgtcctcgtcctcgtcctcctcgtcgattgccagccggtcgcgttcgccgccgacgcgagggctgccgctaggcgacgcgccgttgccactcgccgccgaggcagccgccgccgcacctcgggcaagcgttgagccgagtgaggcaagcgtcatcgagtgccggtcaccggtcgggagcgtgtaggtcgcatgcgcccattcggacaggaagtactttggaagcgcaagtggcgagggcaggtagggcagcagcttagagagtgttgagggtcggttcctgcaggcgaataacagagggtgggcaagggatcagctactctacccaggtaacctctcccagcaaaggacgtagactgaccgtgatttgtcgtctgcctccttgccggctgaaccgccgccgccgccgccggacgctccccgaccgccagagcccgcgcccgagctgccgggagcattatcgaggctgaaggcgtgtaacgtccccttgtcgctccatacggcgagccactctgccttcgttcccccgccaaacgcgacgccgccctggcggaggaccgccttatcggccccacgccggagctcgcgctcgagcgcgcccgaccggccgctgaagacgcggacgagcgtccctcttgtcgaagtcgtcgagacgagagcgcccgaaggagagcacgttaatgtcgagagggccgtcgtatgtgcgatgaggatctgcgagcgcgccggagggagagcgaccggggtcgctggcttcgtcgtcgaggaggaggcggctgacggggccgggtggatgtgcaggagatggacgtggccggcctgacgaccaggaattgcaagcagcgacgatccgggggccgatgccatagcgatcaggcctgccagcgacaggacgaaggggaggtcagctctatagctggggtggcaagacgacagccggggcaagaaacgtcgactcggtcgcacgcacccagcgggttgtcgaccgtcggccactctgctatcctgcggagtgagcgcggcttctcgatcatcgctcgctccttgcccttgctagtccagccatcggccaagccggaggtcacatcggtggccgtgcccgccgcctcaggagacgccgctgccgcctcgccaatctcaaagaggacgacccgccgtaggagggcgacggcgagtagacccagccggctctcgacgccgagcacgcgctctctggtcgtggagaaaggaggacgatggcggcgagcggatggaggggccgcagcgcggggggacgagagcgcagcaggcagcgagcgagaagaacagatggtcagccacctgagctgatgccgtcgacaggccgcagcgaccccacagctgtagaaagcacaggagcaggtacgagaggactgacctgaactcgagctcaacaaccgccgccgcccggctctcgtcccagaggacaaccttgttgggcgaaaagacgggcgtcggcccgccgccgacgaggaagaagagggacgaccggccgtaagcgctcgcgtggccgagcgagccaggcagatctgtacgagacgcatgcgcaagtggattgatgtcagttgaaggctttgcggagctgagcgtccgacgacggcagctcgaaggcagggtgatggagagtggacgggacctcggcggaggacgaagcggagcggatagagctgccagagctcgaagccgccgtcggtggcgagcgtgaagtgggtcggctcgggccgggagaggacgagggcgttgtgcttgggcttgggaagggtcgagatggatgtgcgggcgagatgcatagaggacgagtcggaagcaggaggcggtggtggtggccagggagaagccgagcggcagggaaggcttcggcgcgtcgtcccttcagcgggcgggacccggcgaaccctctctcgacaacgctacgaagttcgaccttgcttatggagagcttccgtctgcttctgatgcagctcagcaagccctcgcttggactggcaggccatctcgaaggggagaggccgtacactctgcgggagctgacgtcaagaggactgcgcgcctgctcccgcccgtcggctgcagcgtcgtcgtctgctcagcctacgctgcttccctccgacgacaccctcattcctcgctcgctctctctactccttggttcatactcctaccctcctttcctaccatgcctcgcctactcgtcgagatcggcggcgaccgcttccacgccgagatcgcccacgtcaatgacccgacccggccgaccgagatcgacacgtacgtcggccgcagcctttcacctctctgctcgacagcaggacaaagccagctgacaacatagatccgctctctttcactagcgagcgcttcgtcggccgcgttctcgtgcgcgtccgcgatttcgacgggtcagcagggcagctagacgaggtcgcgcgtcttgccgcgcgctgacgtcggcctccgtctgctcctcctccctcgcagcgtcgcacccgacggccacgagcccgtctcgcacgatccctactttgacggccggagccgcaagtttgctatccagatcgaggggcgcttcaaggagcgtcctggcgttcctgcctacacggccgacgaggtgcgtcaggcattgccaagagggctgctgcgggcgacgcatcgaatcgatcccctcctcttcttctcctaccgtcttcacctagacgatgcaggcagtgctgacgcctcctcctcttgccgcaatagattcattttggcacgtacgtccatgaacccgatctctgatgcacgacccccgggctaaatctgttcgacgctccctcacagcgactttgaccacctcgtcgatttcccccgctcggccttcaatgcgggtatgaaagttgcgcaatgggtcgacccagcaaccttttacgaggagtaccctccctctggccggccgttcatcatgagcccctacgcggcgtgcatgaatacgctcgccgcctggcctgcaccagccagagcatccgacgcgatcgttgtcctccggcacaccgagctcgaggacgtcggcgcgagcaagcacggcgaggccgatgtgcccgagggacttgaggacctcgtcccgctcgaggtccgcgaccgatcgaagaaggacggaaggcacctcgtccgctactggcgcttcctcggctttcgatcagacggccgtgttcaggattggctccgggcaaccgcgccggccctcctccaggcagcgacgacgcccatcgcgtccggggcgatgacctcgactcggccagggatgacgcaccaggcgtcgctcggcgtccacccgaggcaggccgagatgcccgagccgtcgacgagcggcgtggcgacgcccgtctcgccagctgaaccctcgactgcggccgtaaacggcaagccggctaagaaatcgtcggggtcctttggctttggggcgctcaagaatgcgctcagcggtgtatcgtccggctcgagcagcccgaagcccgtcacagccgcagatgtgcgaccctcgctcctgactcttccaatgagtttgcagcacatgcttaacgtcccctctggttcactttcaggtgacgaccgccgaccagctccggcctgcgcctgtcagcgatcgctcgccggtcagcagcgcgctcgacgaccagctcggacctttcaagttcgccggcgatggcgttgacgtggtcgaggtgcgtccttctccttgacttgttacccactggaccgagaggggttcccctcgactgacctcccccccccccacctctttcattcaggacaacactttcgtctttgtcgacaaggcggtgccagtcgccaagaggcgcaagcactttgccgatccggcccgtcggcgcgactttacctacagtcccgacgtcgtctacgcgacctgttcgtcctaacctctaatcagaacgactcttgcttgccggtcattacgatcgctgacggccgcttgtgcttgcttccagccttcttcacctcgttcgccgacctcaataccttcgacctcaaggtgcgctctcctctccatctaccctgcagcctgcccactgaccgccttctctcatccgcgcggatgtcacacagatcggcccggtccacctcaacctgagccccttcttcaaagacatgccgatccgttacacgctccgctcgacgcgccgcgagtcgacgccggccgagggcggcccggccgaggaagaggtctttgcgaccgtctcatttaggctcattgattgagttggcggcggatagttagtctggctctgcccagtcgacggtgttaaggccctcacagcttctcctcggacaagtccctccatcgtcaggcccctctgttgtctgccctgcgtcaatgccacccgtaatgccgtctgtgtaaagaaactctgtaaagcacattacaaagattgctcccgaaaatgggaggccggaaaacaggaagggaaaggaagccgcgtctaagccgggcggcgccctctactcgagcgcgcgcatcatgatctcgaagccgacaaacgtcgcgccgttggcaaatgggctccggatgagcgtcggtccgaggccgtttgtaaagcctttgaggccctgcttggcccagacctggcggaagcagtcggccatcgagcggtactgcggctgcggggcgccggggttggacgaggggaagaagtcggtctggagtttcgacttgatcactggcgggccgggtacggcggtcagtcggggcaaagtgcggctttcggcgatgaggacaggaacgaaccgtcaaaggggtagatggtcgcccagagggcgtagccggcggcggcgccgtagaggacggcaaaaccgggcgagacgtcctcacgccggaggcccgattggcgcaggtggcgttgcatgagggcctcgtacgcgaagaagtaggatctgagtcgcaggcgagagggtcgtcagccgtcaggccaaaggatgaagtgaagaggaacgaaagacgcacccgtagccgagtccctcacggatgagcgtcggcacctggcccttgaacaggccccggacgccgtgagcgctgtagatggtccggatgcagtcgagcgggcccgcatagagccgaggggtcacgttgggctgcgtctgaaggcctgggtgagcaggtgggcagaggatgggaggggtcagcggctggcagcggctgacggtagacgcgtgataaattagtacgcacggatacggacgtgctcgacagggcccgagacgattgagtttgaaaggccggcgacggcgcccgacgtgaacaactgggctacaaggcggaccatgcgcagcattcccggtcagtcctcgcctcggagcgcagggcgttgcgcaaagtcatcgtgcagaggcttggacgtacgagccgtgagctcagtcgagccgccgttttgggccgcaaagaagcgcttggtggagttgagggcggcgaactggatcgagacgcagacgcctgccagccgagggcggagcgtcaaggttcagtaaggcgccagctcggggttcaaagggccgcagtaagacggaccgatgccgagcaggggcgtgagggtgccctgacggatagagcgagcagtccaagggcagatgatcagcgccaagcgcgagtctgcgcctgcgcacttctcgtcctagcaccttgtagaatgcgagcgggccctcgttcttgatgaccgatgtgacgcaggccatcgtcgagctgtacgtcccctgcggagcggtctgcatcctctgtgatcacccgcacaggacggccgcgcagatgaggccgagagaagcaaggtcagtgcgcgcgcaggaggagaaggggcgaccgcggtccgcgcaggcagagaggagccgctgtcccggccgacgccgacggcgcagagcgaaaggtaggacgcacgactttgacgaggtcaaacggctgaccgacctgcatttggagggtgcagggacaggcgtgtcagcgctccaacgtcagtcagctagagaagcaggagggagagtgcgcacgaggacctgggtcggttgagccaagagagcgaggcgcgtgccgagagagcgagaaggcgctgcgagtcagctccagagttggcgtgtcgtaaagcagctggatccggacctgagcgacgccgcctgcggtgcctgcaatgatgtcctttccagcctgtgaaaccatcttcgacgtaagagggagagggaggagaggcgaggcaagcgacggtcggagggacaggctcgtgcaagcgccggtgtgcaagcgtcgcggagtcgcggtgcgcgggggaccgtcgcctttgttattttctcgcggcgggcgaaagagacgacgcgtaacggagcgagagctcaacgacggcacccgatcctccctcacctcctcctccttcctctctctctctcgctctccgcacagaaaacatttatccgatcaggtccgttctcgtagttgtgttgcgcgctcgagagggggggaacaggcgggcagaacgggacgacccacaccacgggtcacccgagagctcgacacctccacctcgaccctccctcgacgcgacctagctcgacgtgctcgacgccgtggctgacgcgatgctgcccctcctctcacctgtaagatcagcctcgccgcctcttgctcgtcctcgtttcatggcctcctcgatcgtctctgcgccgtcgctccagcagcagcggtcgtcgcccttcccggcgtaccaggccgggccaccagccgcgtcaccaccaccaccaccctctctccactcgatccggccggcagcagccccggcagcagatgccgcgcccttggtcaagccgccgccgatagacgtcgcatcgtcctcggctcgcgctagcttgtcatcgccttcgtcgccggcgtgctcggccctgccttcgtcccccaccgccaccaccaccaccacctcctctagcagccgccctcagcaagttgacagccagcaactcgcatcggctgccgctcttgctgccaagcgcgagaagcgcaggctccagacggcggcaaagcgcgagcgggcgcgtctcgcagcgtctgtcgttgatggctcacgtccagcacccctgtcggcggtcgtccctccgccttctgcgaccaaggccgctcggactaaggcgccggccgggacgagcgtcgaggtacgcgaggtcctccgctggagctcaagcagctcgcctgccccgccgttcgaagagcttgcagacggaccggccggtgcgcccccctccccctttgttggccggcgcgcgcgcccttctgcctcttgcgccgactggctgaccgatgcttcaccctcgttcacctcgtagctctcaccgcctcccttcagcgcttcccttcatcttcgtcctctcgctcaattccatcctcttccggctcgccaccgcctccgccaggcatgtcggcctcgatgacgacaaccgtcggcggcgaggagcccgacaatggcccgcggacacccccgcctccgccagctttggaccacgcgcagacggcgggcgggattgtcggcgagctgcttgacgcggacgagctccggcggctccggcgcaaggaaaagacggcgcggcagaaggcggccaagaaggcgctcgctgccgcttcggctccgccggcggcggcagccttcgctccggttcagcctcagcggccatctgcggccgtcatgtcggctccgaaaccgaaggctctgccgctcaaggccggacccaaggccaaggtcgggccggctgcttttggaccgctgcacgtctcgcttccgacgcaggagtcgccccgcctagcgtccgaggcaggctcgtcctcttcatcttcttcctcgccggtggcgtcggtcgtcaggctgcccatgaccggttaccggcccgactcgtcgacgcccgctgccatcgcctttgtcaagcagcgcttcccctcgcgcaaaaaggcggcagcggcgatcgtcgtccggctcccttcgacccgtctcgaccggggctcgtcgacgacgacgtcgccgccctccgcctcctctccgacgccggacgaccaggtccgactcaagccgcccgtccgccggcactcgccctcgccgctccggatcgtcagccccaagcccgtccaccgggcgcccatcgcgctcctccggccgccgttcctcagctctccgtcggctgccgggtccgtctcgtctcgtgctgggtcgaccgccagctttcacgctggcccgtcgtctgctagcgctgccggtggaggaggggagtatgcgccctcactcgacagcggagcggcagaggaggatgaggcgggtgctggttcgttcgcggtctaccctgagctccagcaaccgcacttcttcgactcagccggccgatttgagccctacccgcacgcccagttccagcagctcccgcagcacgcgttctacccgctgccgctgccgccgccgcagatggtcgactggcagcagcagcagcagcagcaggcgtccgaggcggcttacgcgtaccacccgcacgagtacccgggcgcatgtgcgcagccccagcacgggccgtatggcgctccagccgtctcggccagccagctcccgcacctccaccaaccgccgcagccgccgctcgcctacgggctcggtttccacccggtcgcccatccgcaccacctcggccagcagcacggcggcccctaccctcctcctcctccgcagcacgccaacgtcatgctcccgccgggctacacggccgacggcggcgtctactgggatccggcgactggccagccctacctctatgcctacccgacgccgcccgcgtcatcggccgcgccacctccaccaccgctaccttccggccctcttgcgctacccatcgacggccccgggctcgatggactcgccttcatccagcagcagcagcagcagcaagaggccgcgctccctccgttcccggccgcacccccgccctcgccgccggccgtgacgctctcgcagccgctgccgctccaccttgcccaacggccggcgtttgtccctcgccagcagacggcagcaccgtcgccgtccccgccggcgttcgaccctgcgcgggcgctcggcgccggcggtcaggtttactacgcctagcccgcgcccggcttcgctttctgggtggggacttctctcgatatgtcggcagcagcagcattaaccacaatatatgcccctttgcccttctgctagcgttccctttttgcgagaaagtggcgttccgcttcgtgcgtacgcgatgcaggaggacagccggcgatgcggcgcggcagggagcgagcgggagaacaagggacgcgtctcgtctcctcccgctctcccgcccccgtcgtcgaccttgcgcacagccgaaggcggccccctccctcagcagcagcagggagcggtaacgcgagcgaacgcgggcgaacccgtctgacccaatccgaggcagagggacggcccgtcgctcaaccacggggccgcgattaccgtcgtgcgtcccgctctccttccttcggctgctcgacccgaccttgcctgcagcgacctgcccgcctgccctccactttgccttcgcttccagagctgacgtcgagcgacggacaccagcgccctagtcaagtcccggatgcacatgcccgggcacctctcggcggaccggtacgtctcgccgccgccgccgccgccgcgacgctcaagccgcgcggggactccctttcatgctcgacgagctctcgactgactctcgtccttgcttcgctcttctagcgatgccgcatcacggccagtccgccctcgtcctcggtctccgtcgagccgacttcttcgagctgccacctcgttcgtccaacgctcttaaccccacgtcctcgtcgacaggactctcccccgctgacgcaccgacctcctcccccttagcgagcgctcaccccgtcgcgccatcgtccgtcgcgcgcacggcttctcagggatctcttcgttgagtgtcccgcccctcgtctcgtctggcgaggttctgccggcgtcctccgtccgccctcaagggtagccgaggccgccgcacgccctcgccggcgcaaggctgtcgagggtcacacactccccgaccggcgcgtttgccggccgagaggagggtgttcaagggggtaagctaggcctcagggatccatcatcgtacgtctctgccgtccctcgctccccttcgctgcatcgcaagagcctgaccgcggtcgccgctcgccccagcctcaacttagccgcagcgaggtctgcgttaagcttcgaatgcgtcacggcgcgagctgtaacacgctatcggagaccctaacccaagagactcgtcgtccggtccgacacgagtgcgtcattcgctcaggttgacgagctttgcctgcgacggctcggtgctgactcgcttcatccttccctctctcagaccgcggcccgccggtcactgccctcgccgaacgctgtccccttcagaagcgccccaattcccgcccgccatccctcatctgctgccatgcgcgcccagcaagcaaccccctcgccgtcggttcggtcgacatcctcaacccttgccgttgagctctagagctgctgctgctgctgtttgtcgcgcgcgagagcgcggattcggacgacagcgccggcctcgggagggcccctcctctgaacgcgaccgactggcaacacgaggcgctcgaccatcagggcgaacggtgcgtgctgccccgcgctcgctctgaagccgatgacaaccttttaggactaatctcgtgctcctttgcctcgtcccttccgcattagctgaatctgtcccgctcgatcgagatacaacaaaacaacctcatccttcacctctcgcctcccaacgtccgtctgcccccagatcgacgtcctatcttcatgccgccctgccccactgctcgcgatctgtgccagcctcgctcgcgcatcgaagcgtcctcttttgcctgcgtcctgcacccaaccctgctgttctcggcgcctctcccttccggcgctgcttgtccgttatgttttgggcctcctgcctgctttaaggtggctcttcgtgttagcgaaagcggtccgccctcgtccgctcctccctcgacgcaatcagcgacgcgagtacacgacgagtcagccgtcagcgcggcgccggaatagccctgcatgaggccccatactttggccgcacgtccccgggcgccaacctccctcgcccgaagatacctagccgtgcgtcgtgggttgacgtagcttccatctgatctccctcccgggccgggtcgcctctgtgcgagctgggaccctttccgcccctcaatctcctctcttgtcttctccttaactggtccctgtagacgagcaacgctggcggcgcaaagctttactccttgccctgaagaggcgcgagggaagacgtgtgcgtcagcaaaggttctcggcccagagcgaggtcgagggaagagtcgcagcgctgctgcttgatcgtgcaaagaagaggaaacgtacgatgacgagctggtacatctgccagaaggcagtcgcggtcgagccgaggagggcgacctgggcgacacctgaagggcggtaggccaaggaggcgcaggaatgggacgcgaccgaggagcgtttgcgagaaggtgcaccgggaggcgtgagagagtcgtgcgcgaagaggggcgtgggccggagcggggaaggagccggacgccgaggagaaagccagagagagttgaggaccacgaccgcgcagcgggagggagccggaaaggcagtgggaggaccatcgaaaggaaggcggccgatgatgatgcaggacgtgcgtttttgtgagtggagaaggcggcagaaagaggcaaagagaaagcgtgaggagaggagggcgcgtcagcgggtcgtttcgggctcatccagcgcaggcccctcctcgagccggcgtcggctcgactcgaacgcaggcacaaagggggctctgaggcagccaggtgcggtccgagctcctccaagtctcgaggtcgagagcagcatctgccactgcttttcggagaagcgagcgagcgggctgacgaccgagcacgaggcagaggtaggcggcacgcacggaagtacatcttgccccggccgcgaaggtagacggggatgtcgctctgggcctggaacttgacctggttctcgagaacgcgattctttgcggcgttcatgtaggccggcgcggccacccggttgggcgacaacagcgtctggagcgactggggctgggcggaacggcggacgacggacgagagcatggcgggcgaagggacgggtctgcggttgaaggcgaggccgaacagagcgcaacaagggtcagactcggacgcgtcacagatttcgccctggacaggcacgtacgaaaggtggctggagggaggagggacgagtggttgaggaggagcaaggagggagggagaagggcgggcggccgtggtcgggcgatgcgcctgcacagggagcagtgactcggcttcagagatgcatcacagcgctacacgagagcaacgaagctcgcccgtttgcctctcccgtcgtcgacacaggcccccttccccggctgggagcggttatacgggatcttggagctcgccaacagacggcaaggggcggatgggtcgagtcgggtgcctgacgtcgtgcgtcttccccttggcctcggctggaccggcgcgcagctgacccgaccttgcctcttgctaccttcttcgcggagctcagcacgccaagtctcgcattacggctggcacctcggtcagagtcggaccagtgcgtcgctctccttccagtcttcagatacccgcctgtcctattggctcaaccgctgtgcttccgtcttctgctccctctccagcgatgctagccctcaggcgagtgcccatagtttggcgtcctagcttcatgtcgccctggctccgttccggtcttctcgacgcctctcagcggtcgcgcctcctcttctccgggacgcgttgtagccacaagagtccgcaaactcgcgctacgccgaggcagagacttgcgctgatggctagacatctgcttgggcgctcaacagcaagcgaccggccatctgcgcctttcgactcgcgtgcatctggctcggctgagtcgagcgccgcgagcgactggcttccagggcggtgcgctaatacgactttcgcgcgctgccgacaagcagcccggtccaagataggacttcgtattaatttcaagccgggcaggatgctccgtagttcgttcgcctcctccttcagacagccgagcggacgccgacgatccggtcgacaacctgcacgggatgccgaagggcgctctcggtcagcgacaagcaacgcgaatgggacatgaggggagggcgtgcgacacgggcacgaggcggcacagaggacgaaccgtgcggatatatgggagcgagaggaaggttccgatgaccggcagctggcggagaaagttgaggatgacggggaaaaagtcgctggttcggtcgaaggagaaaatcgcctcagcaggggagactcggacgggtcccagctatgtcaagtcctgcagggcagagggacggacccaaagaggttcaggaaaccaaaggcctcgatgcagacgccgacaaacggccactgttgcgagcggcgacgagcgaggagattgcgcaagatgatgtcaagacagtcagcttcaacctttgactttgaatcgctcagccagcgcgtgaccagcggcaggttttgcgacgcaccttgaggaagacgagggcgatgccgaggaagaaacagacggagccgcggagcttctccttgcgcgagaagaacaggagcgtcttgcgcgcgccgatgatgagtgtcaggcccgagagaaagaggatctgcgtccggcgtcatcattgccgtgtgcgaagagcggttccgtgagcgcggggggatgaacggatgagaggcgagagagggcgcaagggtaggcagggtctcagtcggctggcgtcgtcgagctccgcccgtcgtccagagaccaaactcacgttgccgagcgcgagcaggacgccgtcaaagaagaggacgataccgagaagcatgaacagcatgccgacactctgcggcggagagaagctcaatcagcgaggcactcaaggaggtgccgccggcagcgaccgaggtcgagcgagcgctcactgtcaggccgacgccaatctctgctcggaccggggacgagccggaacggagcggtcagctttcggggagcgagctccggagcaggagagcagaatcctacgcactctgggagtctgagagccacatcgtttgaaagtcgagcgagaggcgagtgagagtggtcggtgttggaggatgagaggacggcctgcgccccgccatgcgcgccgtgcctttgggctctggcagctgccggccacccgagcacgacgtctctcctaaccttcatcttcctctcaagctgctcaagcaagcacggccttctctttgctatctgtccagcgcgcactctaagacgagtgatattgccatcgacgccgaacttccgacctcggccgcacgcgcgttaactcctccgctcgagcccgcccgccttcagcccatcagtcgcctcgaggagccgctcgcacgacggacgagacaagccagcacgctcgctttgacgggctaggatgaaggctcgcttcaggtgtgtgatgctggcgtccggtgtgaggggtaaccaggctctgactcttcaagctcgcgcctccgcccttcggttgtcactccccatcgctctcaggctcaagtcgtcgtcgagcaagaaggcggccgctgctgcccaagcggcgcatgagcaggacccgttcggtccgcccttgccaccgcctccgccggcgctcgactttaagctgccgtcggccgactttcggtcatcgcgcatcctccccgagtgcgtcgccgagcgcgcgcgcgccttgttcgtgcgcctctcgctgactgccgtgtactcgcctgtcgtctgttcatctcgccagcctcggcaaacgctttagcctgctcgcgcgcaaggaagaccctgcagtcatcaaacacaagctcgcccagctccggcaggccaacggaccggacgggctgacggccgaggaggaggacctcgtctgccgcgagctgcaggagctgcgcgaagagcgcgagaaccggatggacggtgggcgctcgccgcagactgctcttgctacgtctgcgtctcctggtgggccgtcggcctcctcatatgccagtcggtcgcccaggcatttccacggccaatctgccgccgtcgaccgcgggctcgccaagtcgccttcgggttcgtccaagttctttggcggcggagcggacgaggcagaatacatccgacgagcaaaacggagtgcaagtagcaagaacctctcggctgacctcggcggcggagagccgaggacgacctcccggcggcgcggcgttggtgtcggcaacgtcctgcagttacctgtcgatgacgaggtcgacgccgaggtgccacttgtaagcaacctgccgagctcgacgtcgtgcggcagcctgctctccgaggccgactcgaccttcgagtacgccccgctgcaggacctgccgtcgcccaacgtcgtcccgcctcagtccttcgacgccctaagcccgacgccggcgacggaccgctcccgtcgacgcaaatcactgctcgactcgctcacaccggcgcagatgaagcgcgtcagcgcgacgctcgcgctcgttgaggacgccgtctttggcgtcgaggagagcgaaggggacgcgcacgcgaacggccggtcgcccttggcggcctccacgccagcccagtcgcgcgcgccctcacacgaccatcgcgcgctgtcgacggtcatcgaaccgccgggaggagcgacagagcagctcgaggcacagcactcggacgagcgcctgacggccgagtcgccgagcgcacctctccccaagcaggaacgacctccggggctggggcaggcgaaacgcgtgccgtcatcctcaggctacatgcccggacctcgaccgatgcgcaaccgctcaatctcggcctcgagcaacccctttcaactggccgcgtcatctggcggctcgtcttcggttgccaggctcacgcccgacgcctttgcctcgcccgacgtcgtcggctcgtcatctttctcggccgccggctcggcccgaacaccatcggagcacgaccaggcgagccgcgactcgtatgggtcgcaggactccctgtcgagcagcaagcaccaccagccgccttttgtcgccggctcacagcaggccgggcttgttctgtcgccgctgggaggaggctggggctcgagcgggctgccttcggacatcgagcagccgtcgcgcttgcggtcgtcgtttgggccggatgacctgcaaaacacgccccatgcgacactggaggaagatcggagccggtcctcgtcggccggtcactatccatcggcacacgacacgtctggcgatcagacggcttcccctggaccgtcaagctcttccctccatctcgaccgcgaggagctgctcgattctcgcgcggatcaattcgccgatcgtctgccgtcgtcggtcgacgcgaatcaccagatcggcctgatccctgcgtccatgtcatcgagagcgttgcacggtcatcagctgtcgctttcgtctgctggctcctttgtgctgctgcagcagcagcagcagcagcatcatcggcaacagccatcgctcgccccgtcatggacctcacggcccgactcggccgattcggcggcgttcctgccgccgccgattgaggcggcgcgctactcgtcgcacggcctgaccatgctggcgaaatcgccatcgagcagctctctctcgtcgtgcggatcgagctttcacagctctggcggcactgccgccatcggccagtcgctaccggacccgtcggcgcggctgcttgaccacgagccaagcccaccacgacttgatggagccacatcaaatcgctccagccacgatgcgtttgccttcgccgaggtggctgcgatggaaaagctgctcctgacggcgagtgggctcagccgacacgatctcgcgctcgtgcatcgcaagctcatcgagttccagccgacggcgcccggcggcggcgacctcgactcgacgacgccgcggccgcgtacttccaacctgtttgcgagccagacgagcacggtcgaggacggacgtttaaccccgccgacggtgggctcacgcccctcgacggaccgcgtcgagccaagggaccttcagccgggcgaagtcgccggcgccagtccccacccttccggcccctcgtccgcgccagcctctcatcgcactcagcggtcccgagcgtcgtcaatcctcgacccagagctcaccagctcgacaaatgccgttcatcagctgcggtcgtccgactcgcctggctcgcagcccacaagcagcgaggcgtcaacacggcaaccgaccgaccagctaggtcttgggcggccatctgcgccggcgcaaatggcaagcgggaagccacgggcggcgactactcctgcgggatcgttgccggctgctggtgtgcactctcgatcgatttcgccgccgtcgtcgccgatggccgagcgtgacccagacttcgaggacgacttccgggccagggtacgggttcagctttcagctcttgcattctctgtctgtcgctaacggctgtggcccggccgaacagattgatgcggccgacagcgcgctcaggagtcagtcgcaaccgtgtctttgggcgtggatgacgcagagctaacccagacatcacactctactcatctgcagagtcgccctcgatgccgcgcatcgtctcgagcaagcttagccgcaaaaaatcgttcaagaacgcaaagtcggccatctcgcagcctcagctgatttcgtcgacgtcaaaggtcgaagcaacggcgatcgccatctcaccgccaccgtcggcgctgcccgagcggtccaagagcatgtcgcagcgttttaaacagctcaccggccgacgcaagtccaaggagaacctcaatgacgcattttggatgcaagacctgccgccaagcccgatcgtcaacgtcgaggctcggagcccgttgtcaccgctgggctctccatctcacgcaatgaggccaggagggagcgacgctttcactttcccgccgcggtcgtcccttcccgagcgcgcagccaccgagtcgccgccgccgtcgcctctcgattcagctggcaagaagacgctgatgggtcgcctccgcctgcggaagacggtcgagccaatcacaacctctgtcaaaacgccgccttcaccggcgaacgagcgcgttcaacctcacacggcgccggtgtcgtccgtgcgccagttctcgggtccgccaatggaaagcacggtgctttcgttgtcctcctcgccgacgcctgtcttcgaccagcctgcgccaggcgacattccccggtcggcgtcgttccagtcggaccattcgcacgcgggctctgttaacgcgctttttgacgcagccagcaaactcggcatcgacgcccaggacgtcgacgcgctcctccggcggtccacgtcggtctcgcagctgtcgacgcgcacgcgtgattcaacccactcgcgcgtcgcaccaacgccgccaatgacacgggctgcctccagtcggagtcacctcgctgttggcagcatcagcgaggagccgcgcgagccgtctgatagcctgactcttccggtctcgacctcggcccggagcggcctgagccacgtgagcggcgtcagcgacgagtctcttgccaactccatcatgcgtcggaccgtcatcctgccgcaggagaacggccggctgtcatttcaggcgccagtcaaagcttcggagcccgccttccagccaccgctcccgtcgccggtcaagacggccggcttcccacggtcgccagccaaggcacggctgagcatcctcgttccgccgttcccgggggcagacatgccgctgctattgccgcgtcacgacatgcgcctgtcggccaccacgcgaccgtctctgtcgccgagcgagggctcgttcagtcgcacgggccactcgtcggcgaacgcttcgttctttgacctctaccacggccagaccgaagacgacgacaatgtcgagtactatcacgatggcagtgaagaggacggagatcggccgcagctctcgcgggcggcatctgcctcctcgctcggcggcgtcatccagcccggccaagcggtcgagatcctcgaaatgagcaacggcgacgtcctctactcggtcctccagggcctgcgcgacattgatgacatcgacgacgtctgggacagtcgctcggacgcggcctcgacgatggaccgcccgccgtcgagcctgatggacgagcccgtccagttgatgttccgcggccagcgctacgacggacccgacctgtcgaggcgcagtctcttccagccttccagggcgccccggcccgagaccaaggtgcgccgctcgccgacttgacgcctgacgcggctcgttttctgacctcgatcgccgcaacagatcttctacagctctgcaaaggccgtctctgacctcatcaacgagatctcgcacagtacgtgcggcatcacgattggtccccgatcgcaaccgcagccactcaagacggctgacccatccccttcttctaggtcacgaccagggtcagcttcaattcaccacgtcgccgacctcgccgagcttccatcgctcgctatccttcaattctggccacctgccgctgaacgtgccgaagcggtcggtttcggtcaagcgaccgccccactttcacgatggggactcgcgcttctcggacgcgccctccaacggcgaatcagactactctgtctcggcccgactcgaccggatgatggactcggtgatcgaccaggccgtcgccgccgcgcccggtcccagccggagcggctcgatgaccctcgacgtccctcagccgccggttccgcgctatacggccaagcgcttctgatccgtcgcatggcccaaccatcgccacgtcgtcccaatcttttgtcagcaaaacactccacctctctcaacctttctgaaaaggctccctcggtccccttcctccggcgatgccggtttcgcttcttgtaccacccatccgctggctctcccatgagcagcgccgcttgatcttttgctgctcccttcccggctcctgctgcacccttgcttcctctgccgtacgccacctcccgtctgccgcaccacctctctgctttgtttcatctcccgcgctgcccgcatcctcttttgctccgaccgcctgcctaaatgcagcccagtcaccctcatgcgatccatccctcttgtttcccgccgagcctgccggcggacatccgagttctcgaagttgtctggcgagacgaggacatgcatagcgcgcctagttgcgacccttcttcatcgcccgcttgcgcccgacgaggtggccgagccgcttcttctcaggatcctctgccggttccggcgccggcgccggcttctcctccggcgcgtcctgcgtccgccggcgcttgtccttgaaccgcgaacggggtccctcggactcgtcgtcgcgctcgcgcttcggtcgaggctcccttggcgtccgattgatgcgccgctgaacgacctgtaggagtgacgagtaaatggggaatgaaggaatcagcgagctgcgatatgacgatttgagtcgtgacaagggcagccgcacctggacgttttcgatcgaaaactcaacaatgagcgtcttcttcatctcgaccttgcggccgccatccatctggcccgtgagctcgcgctccttgtccttgagccggccgagccgcgcttcgagctcgccgaggtcctcctggccgggcggggtgatcttggacggcgcagccttgggcagctcgtcgtcctcgctctcctcaaccttgcgctgcttgcccttgcgcggcttcttgggcttagcctcctcttcggtggcgccaacaccggtgagctccttcagtcgggcctcgtcgaccgacttcttggtccgctcgataagatccttgacctctgccgcaaaccagtcgcgcatgagcgtctcgacctcgggattgttgttggcccagcggaggaccttgagcgcgtcctggtgggtccgaagctcgaggaaaccgtagcccttggacttgccgaggcccgtcagcgggtcgacccggtctgacgcacggacgaccttggcctggatgacgatcgtgtcgcgctcggccttgcccttcttcttctccttgccctcctgcttggcgacggcggcgctgagcgtaccgtcgcgcttctcgtcgtcgtcgaggccctcgcgctccgacgccttgacctccttgtcaaactggcgggcagcgtagatcgcgagccgcttaagaacgcggtcggtgcagaagagcggcagctgccggatcgacagccgggtcttcgatatgtagagcgacgggttggacgagaggagcgtcttccgcgaattgaacgacgcaagccgcttctcgagctcgaccgggtgcagggttgacgcggccggggcgttggcaaagatgactgtaagccagaggcagaggtcagccgtccggacgagggggcgtgacatcagcccaggagcaggctgagctcacctccctcgcgcatcaggtaagtgttgcgcttgtcgaccttctccttgcgtcggtcgttctcctccttgagtacgccggcctgctcgcgggtgacggcccaattgacgtcgaggacgcggccgttgagtgtcatgttctgcgcgagcgaactgctcgggtcggccgtgaggactgagttgagggtgaaggggttggcggccatcgtccggtccttgacaacgatggcgttggcaccgctgccgccggtctccgctgcgagcatgctcgcctcttcgatcgccttctcggcgtcctccttcttccagaagcaaacgaagcccgtgccgcgcgaacggttcgtagccttgtccatcgtgatgcgggcgtagcgtagcgggccaaacgtccggaaactggtgaggatgtgcagagcatcagtcggcgagcgctgtaggaagaacgggggccgggagcgacgcacagtgtccggagctggtcctcagtgacctcaaacgacaagttccggacgaacagcgtcgtctgctcggaaggtggcgggagcgccggcgtcgcaacctcctcctccacttcggagccctcgccgtcggacgccggggcgaagatggtgccgtcgtccatctcggcattctcgcccgagccgctcgcagcatcttcagcgtcctcatccgccgcctcttcatcatcctcctcagcttctgccggctcggcgaccgtctcctcggccttctccttctcccacttgtcacggctgagcgcccagtcgacggcgacctcacgcccgcccttgcgctcctcgccctcgaggacgatcgccttggcgttgtcctcgccaaagaccgtcgttccgttgacgccctccaacgcgcgctcggcgtccttgcgcgtgagcatgtgcacaaaggcaaagcctcgcgcacgcggcttggcaccctccttgacgaccggcggcggaagtgttacagcgtgaatcgggccgtaagggatgaaaagccggttgagcgtggcctcggtcgtctgcagaaggggaggaacgtcagtcaggccaagcaacacatcagcgccagagcagaactacgcacgtcccacggcaggttgcggatgatcatgcggccgctcttgctgatctctccgccggctccctcggcgcccggggcggcaaccttctcgagccgcttcttgagaacgcaactgaggagcgagtccttgtaggtgctcgcatgcatgcgctcggcgttttcgatcgcctcctttggcgtcgggaagacgacctcggctgtcgtctcgggcgcggctgcgccttcgagcgggaactggagcgacgccggcgacaggttgtacgagagtttgcggatcttcttccaaagcgtcgccttgttaaggccggcgggcaggttcgagatgacgatcgtccggatcgcgagcgggtcgcttccagcggacgagccggcggcggcggccgaggaggtcgacggcccgtcgtcgacgctaatcgacgtctgagttgcgatccgccgcttcttctcgcgcacgatgggctcctcgccctcttcgcgcttgcggtcagcccactcgacgccgagcttgcgcttgctaccgccaaagccacggccgttgagctcggcaatggcgcgctcagcgtcggtccgcatcgcaaaggtgacatagccaacacccttgctggccttgatcggctcggccgtcgggtcggccgggtttggctttgacgaaaggacgacgaacgacgaccggacagggccaatgtcggagaagtgggtcgtcaggtcggtgctggtcgctgcgggccgggcgtgagcgggaacgaggcgcaaccggtcagcctttcatcgtccctcgagcgcagagtctcgcaccgcctggtcgcgcggtcgggtgcgcgagccgatcggctgagagagagcgagagcggacgaaccggtatacggcaggttcgagacgaacagggtcgagctcccgccgcccttcttctgctcagcgccgtcgacgatggcctcgacgtcgacgcggacctcgatctcgtcggcggcggcagtcgtagccgcgtgcttgcgcttgctatccgacggcatggctgtaagggatgggtagtctgggtcgggtcgtgttgggcagaagctggaggcaagcgtctcttctcggaggcgactgggcaaattgaaagccgccggccctgctgcgcggcgctcgctgctgcagctcgaaaccgccagagagccagcttgccctctactgacgaccggtcccgagcctgccttgttctatcttcttgtcccatctctgctctcatgtcgaacggcttcgttcctgtcaacggacaagtgtcgacgcagcccgattcgctgcccgaggcttcggagccggttgcgtcgacctctgcgtacgtttctcccccggggcggcgaggcccgtgcctcgtgcggggtcgagccgaagaggcggctgatctccctctcaccgcttctcactcgaaacagcttcggcgcagctcagtcggcccggatcctcgacatcctgctccatggcttcggagcgggcgcctaccatgactttgtgctcgtgcgtccgctcgcgagatccgggcccgctgcgtgcccctcggcagctgtgcgggcaccctcagcttggacgagctgacgaactctcgtcttcccttcgtacagcacacgaacacgagacaataccgactgcatcgcctgctgctgagtccaagccctcgcctgcgaccgctgctcgacgccggcggcgacgtccatgtcgacctggacgagccggggatgagcgagggtgcgtgttgcctcatcttcggcgacggccggcttgcctccctctgatccagcttcatccctatgcgttgacgtacagagggccttgcgatctgcctgcgctacttctactcgagcgactcactctcatacctctcggtgcggctttagctaccaaggcctgatctgcgcggtcacctccgccccgggcactgatcagctcgactctcctccttcacagctggatgagtcggcaagtcagacggctgagagcgtgcagctctttgcgggcgtcctgagctcagccgtctggcttggagggatcgaggagcttgcgtgcgtccggtgtcgttccggcctggctcgaacaccgcagcaggctcggctgaccgccatgctatgctcgccgttcgcagagaggcagcctttcagaagtgcctcgactcgatctgcactgccactatcctccagtgcgtctcgcagtcccgtcgtctctcggcgcatcctgacgctcagccctcggtttcgaccagatggattgccatcctggcccagccgacgcagcctttcggaccaatctaccattcgcgcctgctctcgcgcgtgcgagaagacatcgtcgtcggtcttccgacagcgagcggggcgtttggtcctgcgagcgacgcgcacgcgctggcagacctcgagagcctgtgcgtccctttattttcctcaaggcctgactggctgcacgcatcgcgtgctgacccgttgaacattcggcggatacgtgcagctttgtgacgctgccatggacgtggctgaaggagactgtcgagtcggcccgctttcccgcctcggagcggcagcgcttctcctttgccaaggttcgccattcatcatcaaacctgcaccaatcccctcgagcacgcgctgctgacgatccgggctcgaccctgcctttctaccaagtctgtcatccagcgtcgcaagactttgccagaggtcaaggcgtccggcgcagaagagacggtcgtactcgctttcggcggcgagggtagtaacgtctgcttgacgcgcaagcagcgcaaaggccggccgctctacaaggtgaatgcctgagaggcggatgacgatctgatgcagcgagctttcagttgtcctttgccccaccggcagccgctagcaagagagagaggaaagcatgtgatcgctcgtgaaacccgccgcccttctcgcacgtcgcccttggtcagtgaccgccaccgatccctcgcagcctccacctcgccgcctcggccctccggcctagtagagcccgccgtaaggcataccgagaaggtcgtagtcattgtactcgtccgagtagaaagcttcggagtcgaactcgtcgtccatctcttcgtaaaaggcatcgagttcctcctcggtgagccgggagagcatctgctcgaggaaagagtaggcgccctgggtggcccgcggctttttgacccggtccgtgccgttcttctgccgggttgcctttgcctttttggcccgttcggcgagctttgcgctaaaggcatagcaggctggacgtcagagacacggcggcagaaatcaatcgacagtactaacaggtgcgcctcgtgcccttcggcgccgccgtgggagcgtagggcgagagcggtcagggtcgagaggcggtagccgccctttacaagagggtgacaggcgaaaaagtcagcgtctgccagatctcctttgaggccgacgaacgcaggaacggcggaccttggctgggatgccgctgccataagtgcgagccggcttgactagcgggacgctgagcagctcgcggtcaccgaccttgaagtgcttcttcgcatctggaggccaggaggcacgagaagggccgtgtcagccgggccatcagcggagaagaatcgggagtcaagctccgaacgcacctgtcttcgtgaggagcggccggtcgacgatcttgacgacgagagcgcgccaggccgacggccaagcgtcgtaaggcgcgtcggcatcttcggccctcttggcgagccgctcaatctcgttctgccgcctgggacgggtcgcgaaaacggtgtcagacggagcgagcgcagggactggacagcgatgaattgacggaccaatgcggatagtgcctagaaaagaggcaagagttgggcgacgaggatcagcgaggtcaaacttctggccgaagtaaagacgacgcacatcttctcgtcatcagtcaactcccggtagatcggtgtgtggtacagtgcggggaggatctccatcagcccgtcgtaacggtacgtggcgacaatgttggcctgcgcagtgacagccgcacgtgtcgtcgactgcagtgcctcgcgctcgggctcgccggcaagccactcggccttggactggccccagcggtcggcacccggcgcgcctgccgagtctgaagtgaagatgtagcgagcggccttccagccgcggccgaacggtcctgccttggtctcccagtggccgcgaggccgcacgaaaacgtaagaggtcaggtgagttgggtctgacttgattggcgcgccgtagtagctgcgctcggatctcgccgtgtactcgacgtcgacgttctcgaccgggcagctggcgtactgggggaacgcggcgtcgaacaagacctgccagacgacgtcggtgtaggccgaccggaacgaccggcaggtggcggagagggcgaggtggtcgcgtaggtcgaggtccgagtcgacgttgacgatggcgtcaaggatctcgataggcaccatcgagaaagagatgttgctcggctcggccagctccttccagcttgcgacctagtggcggggggaaggagggtcagcgaaggcgtcaagcacacaggggctaagcgctcgtcgtcgcaccttcttcgcgagcttcttggctggcttcttcttcttcttcttcggctgctcgtcctcgctgtaatcgtcgtcgctcgtgtccgaccggaaggtcggaagaggcgggaggtcgtccagcgcgacgggcgcctcgtcgtgagcagagggctcgagagcgggcgaaggggtgcgtgcgcgcgtctccttgcccttgcctttgccctcggccggcagctcaggctgagtcgattcgatgggcatctcggtagcttcagagcctgctagccatgagagcccagcgtcagatcgtctgaggcttccgggtgaagcggagaaggcagggatggaggcacgcactagcgacaggggccgactggccgggaccggccgccttgcgcttgcgtcccttgagctcggcagccgactgcgaggccagcgggagagcaggccctgccagaatcagagaggcatcggagtcagtcgtctgatcctaccttgcttctacaagatggtcgccgatcaaggatgcgagacgcactctcggccgccatcgtcgagctcgggctgggcgtcgggccagcgtcctcctcttcatcctgctcgacgtcgcggttgagctgcttctgcgtcgccttgacagacgagacacgggctgagcggcgcatgttgaggtcggatagagagtagagggtggtcgtcgagaattgcgggagatgtgggtgagggcaagaggtcgagcggctcgaaccgcctgcctgctgcgcacggacccagctgacccgccctcgagtaatgctgatgcactcgatcctgaccgtcaagcgaggggaaggcaagcatgcatgacccgcatggtgagcgcggcgctcagacatcatgactgcagaggaaggcacgagcgacctatctccgcgacgctcgcggtgccggcgcccgctccttcggtcgcccgcgacaggggcagaggcagagagcggttgagtgggatgttgtggagcagtcgcgccggacattcggcaaagggccttcagtcgggtggacccctcagagcttaaaagcctgagcgaagatggccgcagagttgcggcgctcttgcccagcttgatgaagctgcagcgagagcagcgacagagcagccggctgcaatgtctcgcagtcgttgacacggcagcgcgatcaagtgggggccggattcaggactgataaacgctgcatgcgctgatccagaccgggactgtcgtccctgacttgccgtctgccagcgctgagaggcggtcgagcgtctcgcaatgcgaaggaatcgagacgtcgacctggccgaacgcaacatacttgccgctgctgagcttggcgagttgcgcaggcgacgacgcgagcgtgatgaagaactgtgattgtggagtgtggatcagcagacggcggtcgacgacagcaagggttcgacgacggacctgcgacgtgtttgagttcttgccagagttggccatcgcgacgctgccgtgctggaaggccatcttgaggccctccttctcgtcgttgaagattcctccgtctgctcgtcaacgtgcccgacaaggagacttgtcagctcagtctcgaaacggtcaggtacgcgaaggggactgacagatgctctcgccgccgctgccatcgccccgtgtgacgtcgcccatctgcgcgacaaagtccttctcgacgcgaaaaacgcgccgaccaaagtccgagagatagctgagcggcgcgtacggcgagcgtttcgactttggcggcgagtcggaggcgagggcgataaagttgctgacggtcttcttgagcccgctcgagggcgagaggtcgatcaccagcggcgggaaggcgagcgaagctggggggttgaccggcagcggcccctcgcccgcagccgggtagatggcctcgagcgtctcccgctggatgtcgtcgagcagggccaactccgttggcagaccatacgacgagcccgagctccggagccagacgagcagggcgtcgtgccgggccagctcggcctcgtacgccggaaggtcgccggccgacagcgtgagatggaccgagctgggcatctgagagcggtcgtcacttgggaagagctcgagagaacgttgacctcagcggtggcgatgcagagagagatggtcgaaggcgtctactatgcaaccgaggtcgactgaggtcgacgcatacaggccggccgacactgcaggcccacttatctcatcatgcgtatgactgaatcgaacgccacttgactcggacaacaacaagacggcaagcagaaatgggcgacatgcatctggcacctcctcagatctcctccaactcgtctctgaatccgtcgagcgggcgaatcaccatccgcccgctgcggggaccggcagttgcggtgagcccggtgctgccggcccaccggcgagcaagatccttccaactgcggccgatgctcggggcccaggcacagagctcaacgtcccaccccttgacgagcgcgagctcggcaatgccagcaaagccgagcgggttgaggtgcgagccggctgagtcgccggtcgcaatgaccatcgtccccggcggatggagcgcaatcgcgagcagcatcttgagctgaagcatcctatgaggtcgggaaaggcaacatggtcggcgtcagcggaggcacgtaagcaagaactttggcgactgagaaggcgcactcgtcgaccgcctgctccttcatgacgctcctctgccgccgatgcaatgacggaccagcactgtcctcttcagcgctactcgcgccactcggtccaacgtcgagcgcggcgcgaacccgctgaagcaggcagatgtcccagccccgagcctccagctggtcgagcggctgccagagcggcgacgagccaacaagggcgagcgtgagcggcgatcggccgcgcgtgaggatgagcgagagcgccaggtgtgagagacgggccttggagcccggtgggaggggcgtgctgttgttggagaaggggtcaagctgcgagatgaggccgactaggatgttggagctgcaggttgacgggtactcgggtcagcaggcagacatgctacgtgcaggcagtccatcactatcgtaaacgcactggtcgacaaagacgtgaaccggccgatccgagccggttgttgcggctggcgccttttgcgccgcagcctgccgtgactcaaggtcctctttaagcgtcttgggcacgccgtccttgaggtaggtgccctccagctcgatcgcgctccgtaagctaagagcgtcgtccggcctctcgctgacgagcttgtcctcgaccgaccgcagctgaagcatcaggctggctgcggatgagacccgtgccttcttcggcgagttgcccggcgatggccgagggacggcaaggtcggcaaaggaagggagggcaaagatgtcgccgtttctgctcttggacttaaccgagcggcgaatgaggcgtgccttcggagtagatccgacctgggcgtccgaatccgagtcggagaagccgacgaggcgcggcggtgccttgggggttgcctgagcagttgagctgccggcgagcttgaagctgattgtacgtaatggagtttcctgtttagaagccgcctttgcaacggaatctggcgccgggctcgaagtgcccaaggcggcaatctcggtccgcaggaggtcgaagaggcgagggaaggagccaagcgaaatcggctcggccgccacagcgcaagctggctcgatcggtggcgtcagagccgagtccgagacgaccgcaggctctggcagggcaaacgcctgaacaggcgtctcgggatcagacccggacgaggacgaagaaggtccggcacgagccggcgggcggatggtgaacgacgacgaggcggtcgagagaggcggcacgcgggccgacctccctgccgttcgccgcttcgagctgaccacagcggttgggtcggaccagagctggccagtcgtccgccgcgggaaatctgcggcctctagaagtggcacgtccgccggtgagaggccgatgtgcgaggcgccgggggtggcatcgcgcagttcgccggagcttgagagtgaggacgtcgtggtggtggtgatgttggggaatcagacaggcttggagggcgagacgatggagccggggcgagatgtcgttcgtcgagtgagcttcaaggatgcgtaggcgtcaaggagttgagagtgtgcgtgtgaggatcgatctggtcgagtctggtggcgaacggagcggagggaaaggagggcgacggtcagcatcgagccggcttgagcgatcggccacaacgcacgcacacaacagctgcagcaggcgaagccaagaagaatgacaggagaaagagcaactgcagagaaggtgtgggaggaaagcggagggggggttgtaggcagggtcgatgaaggtggcaaggcgaaggacaagggctgaagccgaagctcgctcgggcgacacgcgcagcagctcctggcgcgaccgttccgtctcgcatcgtcgcctgtctggtgtagcgtcatgtatcgtcgcagagagcagagtagtgtcacaggagtggtacaggggaggcagaaaggaatgtacaaggccacgcctgcctatgtggcggcggcgtgctgaaggaggacgcgacatcagctcttgctcgacccggcccccatggcctgagcgccgagtgtcgcgaagacctttgcggcgagtgcgcgcaggatctgaagagatacagcgcgcatcggtcagctatcgcacgttgtccgacttagctaggagagcgagacgcacctcggccttgcgatcagcgccgagcgtcataaagacctcgccgacggccttgcccttggcgtcacggatggcgccgagccgattgccggcaaaggctgatggaaatgggattcgacgtcagcgagcgctcatgaggttgacgtagggcaggcaggcgacgcacctcccgccgctgcgccgggcaggttgccaacgatgaagccacaggccgcgcctccagctccaccgacaaggctccacatccggccgtgccgctcgcgcccgacctccggctcgagcaggtcggcaaagacgctcgtgaaggtcgcctcggcgtctgcgtggccggccggggctgagccggtcgccgcgccaaagaggttcgagaagaaggacgaggtcgacgaggctgacggcggaggggcggacgagaaggacggctcggcatccgggtcatccggaaacgacgacgggaatgacgacgacgagggcacgtgcaggtcgtactcgcggcgccggaccgggtccgagagcgtgtaataggcgtcggcgacgacctggaagcgcgccgtcgaccgtgcccgctcggcctcggtcgccgtcggagggagccggtcaggatgacagcgaagcgactccttcttgtaggccgtcttgatctcctcgctgccggcgggaagcgaagcgagggtcagccttcgggatcgagcgcaagaccggcaccatcgcactgacaaggtcgcattcttgggcacagagagcgtggcctggatcgaggaagcatcgacagaggattcgagattagtcgtcaaacgccagcatggagcacggctgtcgagctccgaaacgagagggctggcacgcacgtagtactgcgggcgaggatgagaagcgggggtggtggccattgggtaagcgctggtggtgcaaggttcatacatggacacggcaagagaggtcctcgccagaccaagactcacgttgggaaccgacatgctggctgagtaaaggtatgggactttcggtgaggggtgggagggtgttcggagaggcgacagctgccagcagcgacgctcgacgtcgagtccgagtcgccgcgtcagaccccaggctcgggggttaagagggggtcgatttgggagacctctccgcagacgaccgacgccgacgccgacgacgacggatcgagcttcagccctccacaaacctcgatacaactcgtatattcgctcgcaggatgtctgtcgccatgctcgccgaggtcgctgagcgcacgcacctcacctgtgcgtctcacagtcgctcaccctgttccgcctgccgccgctgacgatcacctctcgcccggctctcgcctcgtccgcagacctcaacgtcgcgctcgccttctcgttcatcggactcgatgccgtcctgtcgctcgtcctcggcctcggcattggcacctcgctcatcgtcgccgccctccgctgcgtgattcagctgtcggtcatgtcgctcatccttgaccgcatcgtgcgtgaccggctgccgccgctgccgctctcatctgctgctgacgagattggtccttgcctttttcatccagttcgaggccaataacatatggggcgtcgtcgggatcgctcgtgggttgccttctgccggcatcaggcgatgttgtcatcgcacggatgggctgacgacaaccgcggtgccccttctccgcagtgctgctcaacctgctcggcgccttcgaggccgtctacaacaagtcgaagcggcgcttcaccaacatgtttccttacattttgcttgcctttgtcggcgcgacaatcccgatctcgatcgctggctcggcggcgatgcagcgccatccgctctggaagccggaccagtacagtgcgcagcctctgcgctgtccactatgcacatagctgctgacgactctgatgtcttctgccttttgccccaatcagtccccgtcgtcggcatgatcctcggcaacgccatcagcgccattggtgtcggcgtctccttcatccttgtgcggaccgagcctcgtcgagactcacgtttgccaagttttcaactgacccgacactccccgtcggctcgcagaaagagttcacggagaacagggacaagatcgagacgtacctcgcaatggtgcgtcgctgctagcgagcgataggtcgtgaagctctcctggttgggcgaggcggctgacttctggtttcaatcgccccactccagggtgcttctcgcttcgaggcttgcaagccggtcgctcgcgaggccatcaagttggcgctggtgcgtacttctgccgcctcgtaggataagcgatgaccttcgagctaacgtcgacccggaacacgcgtctttgcagcttccgacgatgagtatgtcgactggctctcctagtttgccttttcccggcgcgacgctctgtattgatctgctttccccaccaaatctccctcactccagaccaaatgagcgtcatcggcctcatctcgatcccgggactcatgactggtgcgctccaggagttttcgtctggcacgctaggcccgccgtctgaccactcctctaccttgtgctcccttcaggcgcgatcatcggcggctcgtcagtcgatcaggctgccaagctgcagatggtacggctcattatccatccgttcactgctggctgccttggcccgtgctaatcggctccctcccgactctctcagatcctcatgttcatgatcagcgccagctcagccctctcgaccctcgcggccggcgccttctgcctgacgaccgtcgtcgacaagaagcatcgcattcggcctgaccgcatcgttgccggaggcgcgctctccggcggcatccgcagcctcggcacggcggccgtcgcgggcgctaagaaggccggccggctcgttcggggcaagaaggatgactgatcggcatggccttctctgattgacgcgcgcggagggatcaggacgctacggcgggaggccgctgagaagcgtgcgcggctgcagctctgctgcgagctgacccgcagagactcgtctctctcgctcaccttggctccgagtgatcgaggcagcaggggcgacgtatttaacctcagtagtagctgaaaagctctgctatcgcttacacgggttcaaaggacgcgttgttgcgcgggaggacgcgacgaggcgctttgccttcagtcgcctccgaccgggtccggacctgcgcgccaggtctcaacccgcccgccccctctccttggaccggtcgtccgcgctgactggcggactcgatcagagtgtttgccctcggatcgtcgcctctaacagatgcaagttgagaggaggcgcgtcgtatgaagtctaccggtgcacggtcaacattcgcctcgcctataaaggccaggcgggaggcatccgtcgctgctcttcttccctcgtccgcttccattcttactcagccttctacttccttccttcccacttccctatcttccatcaaggttcgtcttcatgcaagctcgattggcctcgacctgcctttgctgacagtctgcttcgccctagatgatctctgcccgcaaccttgccctcttcgccctcggcctcggtgccaccacgaccgccctcgctcagtctaccgccgacaaagtggagtgtgttgcgggccccaactgcccgcccctcatccccaacgttcccacggcccgcccattcgcctgcatcgttcccggtcgtaggtctcagcccgcttgcgttcgccgaccccacctgcctccgactgacgatgcttcatccttgtcagaggccagctttaacggagacttagacccgactggcggaggactgattactctcgagcagtgcgccctgctcaccgcccccggcgtgagtgcagccagtactcgaagcttgtcctcatgccgtcggcgggttccttacctcgttcctgtcctctgcttcagccggcctttgacttcgagcctgcttcgtcggagaacctcgccggcctgggtgtttgctaccgggacgacgtggtcaccattacggccacctctccctgcgccaccgaaggagctatcctcatctacttctttgacggtccgacaccttcgctcctgccccgccgcaaggaggagacccggcgccgtctcgagattgcccgcgacacctcggtctgcccctcgggcctaacggcgtgccgcgtcgaggacacggagaacggctttgaggtgcgtcccgactgtacgttgcttgtctctgtcgcgttcagctgacaggatcctccctgccattgacagtgcctcgacacgacctcggagctcgagtcctgcggcggctgccgcttcggtctcttcgaggaaccgaccgtcgtcgacgagctcacggcgttctacgagaagtcgaagctccttcgtgccgccaagctgggcaagacgttcattaaggctcggtcagtgctcttgcatagctttcggcgtgcgccttcactgacactctattcccatttgttagccgcaacacacggtccctgactgtcgctgccgaggttaccgtcggcctcgagtacgtgcgagcccttgcctgccgctcaagaccaacccctgaccctcctcccctcttccgcagctgctcggaccgctcgctctttggcgaaaacatgacgtgcaagcagggcgcctgcgtcccccttgtctgagggtctcccaacgctccgacttcatctgcctcttgacgcccatttctccctttccgtgatctctgcgccctcatgtctcaccggccccagcgtgcctcttgacgcccgttcgctcctttcctcctcaccgtgtacatagcttctacgcgtgatgcccttctctgtccatgtcttttcttcccacgacttttgcaagtgaccctcctcgatatgcacgcgcgagcgcgcgcaggcaaaagagcgagtcggctgccggcctttctcgacctcgacctcatcctgcccccttttctccttctcactgtccgaagggcctcggctcctcgagcttcgatgcctttggatacgactatcacgttgcatcacaagaggtcaccgcccatctcctcctcacttgcgcccagaagccagccgacgcccttggtgagcgcccggcggccctgcttgacgacatcctggtcgtcctccttcccaccgaagccgccgaacaggctggcgacgctgtgatcggcgctggccgacgtggccgtctgagagcgcacggacgatgccggactggccgaccggaccgaggagccgccgccgagcgggcgaaaggacgagagtgacgacgagagtgtgttgatggtccgcgaggccgccgctgcggcaatgtcccgccggcgcatgtgatccagctctgaagcgccgagacctgtgagctgcgttgcagccgagaccgccagagccgggagattgtcgatggctcgggctgcggcgctcggtgctgtcccaccgttggttgtcgagcttcgagggcgatcgccagcccccgtctctctgggaagacacagcacctcctcctcgagcttgcgccaggcgacgagcaggtcagagatggtgtcggctgggcaaaagtcgagtgcgtggcccatgaggctgagcttgcggtcgacgtcagcaaaggccgactgccggccaaactggtagcacgtcttccagcagacgtcgaccgcctcctgctccgcatcgacctccgagtcggagcgcggtgtggcggcagccgtcggctgctgcaagttgtagcgcgcccgtttcttccggccaaacgcctggacggccgtcaccatccgctcgacgtagccgacgccgcgctcccagtcgccctcctgcacggcggcatcggcgagcatgccgagcgtcttgcactcggccgccttgtcgccacggtagccgagcttgtcgacgagctcgaggatcacctcggggtgcttgtacgcgtcatccgacgtcgagaggatccgcgagacgatcgacagccggtcctttgacagtcgaacctcgagcggcgacagtgtcgatgaggacgccgagcgcgaggacaagttgtaggacgcgatgcgtgaggtcgcctcgataaaagcctgctccttctcgacggccggcgtcggaggcgtgaggaccgagaggctgtcgcagggcagcgacgttggtcagttgggtctcggcaggttaatgaccgcttccctgaacgcaccagccgtacgcctgcttcatctcgcccgagtggaggttgccagtctcggcgttgtcatagaactcgcgcgaggcggccaggacgagctcttcgatgctgctccggtcgagcggtgcgggccgagcgttgagcatcgtctttgcaaccgcaaagtctaaggcacgaaggatggccctctggtcagcaccagctcgttgagcgacagaaggatcggcaggacgcactgcccgaactgaaaagaccgccaaagaagactttgacgacctcaacctcgctcaggcggccgagcgcgccgtcgccgtcgccgcggagcttcttcatgtcgcgcaggagggcctcccagccctcaggagccttgcccttgccgacgcggcggcccttggcagcctcattggcctcggccctctcgccaccgcgccgggcgagtcgggtcgcccacgagagctgctcggcccggtcctcggccgagaggatgaaccagccgagcggagcgggcacgccccagcgcgcaaacgtctcggccgcgtcgaggtggaggtcgagcgtgtcgagcaggatcgagagggccggcgcgcggagcgggagaaagaaagtgtggaggtcggtcggcgagggcgccggcgcggccgccgtcgggcgaaggaactgcgagagcgcgaggagcgtcatcgagccctcgccgtcctcgtggtcctctgggccgaaggcccaggccggcatgcactcaaagatgcgcgacatgacgtcccagcgatcggtccgctgactgccgtagaggattgcgagcgcctcacgtgcaacctcctcgtcccgcttaaggatgcgctcgtgctccggcagcgtcgccttggaggcagcgaagacttcgactgcgagatcgagcggcgcggtaagcagccaggcctggatgagccgggccgggattgtcgggtctggcgtgtcggtccgctccgagcgcgagaggaggacaaagaggtatgggaggaggagcgatcggatgatgggcacgatcgtcgtcgatgttgcatagcggaggtagcccgccgtcacctcttctggcgtcgccgcccgccagcgagcgagtgtccactcggacacgtcagctgcagcgacgaccgcggccgaggacgacgcctgggagcgcgcgtcatagacgagctttgagagaaggctgaggtcctcgccgagcgagtcaaggtcgggcacgttacgcgagacggcgtgctggagaaaagccagcgcccggtcgacgagcccggaagtcgcctcgatgctctcgatccggtgtcggtaccaggcggtgaggtcggtggccgagaggagctcgggctcggtcgggaggtcgggcagcggctcaattggcgtcatgccgagcagacgatgggcctcggccgatccaagccaggccatttcgtcgccggcgtcgtcgtcgtcgtcgccgcccttgacgaggtcggccgcccagggcagctcaagctccatctcgtcgtcgcatcccggcaggagcgcgcggaagagctcgggctggacccagtctgggatcgactcgagcagcgtaaagcggaagggcgcaagcgcatcgcggtgccggccgacaaagacggcgagactccggagctggggcggcgtcgtcaggtgcagggcgaggtacggcaacggcgcggcgagaaacgtcggcaggtcgaacggcagggccgagcgcggagtgccgccgccgcatgaggttgaagctgtcgaccggtgagtgcttgtccgagagacgactcgcccgccagcagagggcgcctcgtcgtcgtcgctgctctcctcaagctcagcccacgggtcgtcatcgacgaggtcggcgagctcgtccagctcggagcccgctccgccgcctgccgccgccagcgccgccttgcgctcgtcgtcctcggcccgcttgagcgccgcctcgccgccgaggagctctatccacgttctcagccgccgacgccgctcgccaatctcccggcgggcagcgagcgcctcgcgccgttctggactgatggccgccgcctcaccctctgatgaggcggcgacggcggcgcgagcggcctcctcaaagccggtcgtcgcctcccatgcacgggcgagcgcaacagcgacgttaccgagctgggcggacgggctggacgagatgaagagggcagcctgggcgagccagagcgggtcggttgcctggtcgagcaggccgagggcggcctcgagcgagagcggctcggtcgacggcagcggtggtgctggctcggcggccgtggtggggatggcgtcgacgtccatgttggccgtcctcgcacgttaggggcccaaggggaggctgaaggaggtcgggagcaggaagagatggtggtggaaggtcgaagggacggcgcgcgttcgtcgccctgacgcggcggcccgggcgtcgcgcagcgtcgcgccggtttcctcctcctcctcctcctcctcatccctccagccgtgaaagcaggccgtcagacgagaacgaatctttgtgatcctgcgcgcgcggagagactgtatgctaggaagaaccagtgagaagaggacttgcgaagggaacggtgctgcatggatatatgggagaggcggagggtgtggcgcaggcgagcaaaggggggggggaggtagagggtccggggggaagggtgggccgctcgatcagccgagagcttcaacagagcaagcagcagaagctgatcaaagcgctgatacctttgctgagacgaagtctctgttggcagcttcgaggtccgacgcagagcgactggcagttgccggccgcttgtcgccctctgtgtcctcaggccgcgcgacctctttgaccttcttcttgagctcgacgtccgtttcgaccttgcgggcgcgatcgattcttgctcgccctctgactcgccagagccagactcctcctcgtccttgtatctgtaaggagcacgacggaggctttagtcagcgcttgaggtcccgagccgacggtcaagatgagcgcaggacggacaaggtgtcggagcccgtcgacgcgtccaagccctcgccgaggtcgaacaggaggaaggtgaggtgcgcgtcgcactcagactgagggtgagcaaggacacgtcagcttgttgcctcagagaagctgctcagcagaaaagcgtgctgaccatcgtcgtcaattcgccttcgaaggaggtgataaggtcctggaactcttaatgcgtgatcttgcgcaaggtcggaagattgctgaagggcggtcagaccttcatcgtcgagacgttggtccgaaggtcgaaggaagcgggaacaggggaagctcgcttgtgtcggcggagtgcgccgcgcagcaggttcggtcgagctggcggggcgggctgagctcctttcgtccctccgaaccctgacctccgcacgaccctccatctccttcagcactctccagcgacgacactctggagctgatgaaggatcgtcacaggacagcatcaggctgtcatctgcggccaaggtcctctcctgaatgcgtcgatgacgggcgagcaactccccctgatcgacggcagcggccagcccgacccttcgctcggccgctcgcctaaggtcgcctgccttgtcctttcctcctgacgaaagcatctcggcctcacctcggccgggcctgagcgcaaggctcgctactcgcttctttgcacccgccgatcgaggcccacgtccgcggccggccgttccggctcgcccgcgctgtcgcgtccggggcagtgttgagcaaccgcctcctttcgcgagctccggcccgcccgacgcgtcaggtggagagcatgccaacaagaaggcgcgcgcgccagcgagaaggcagaaggctgcccgccgccttctcgttgcctggcggcggtcggacaagcaggtgcgaagcgaccatcttccctgacctgcccctgcccatcacccgtcaccctccctccttctcctcggcccatctcgtccctctcgctcacgcctcaggccaccctcatccagtgcctcggtcgccatgtcaggtcgtcctgcctcgccgcaaccgcctcggccgcctcgcccgtcgtcgccctttgggatcccgttccctgcgatgctgccggcttcgagtctgtcgtcgccgctcagcacgccgtcgccttcgccccgccggccgcacacgcctctctcgcgcgccaacacaccagcaccgctcgttctcgcgtccaacaccggaccgcagctgcccgagctcgggctcaagatccccgtccggtcgccaacgccgcggtcgaccaaggtcagcctctggatcgaccggctccctcggcgggcgccgcatgacgtcgaacgcgaggtccggcgcgtctttgaggccggcatcgtcggcaacgtaggtcagggcgggcccgtgcgacggccagccggctcgaggacgaggagcctcggcacgatcgacggcctctgcgtggcctcgagcttgcgccgcctgcaagtcgccgacgaagcgtcgtcgcagagtctcaagccgtccgtcaagctcgtctggtggaacctcgcctcgccgccggttaattcgccccttgactcccatgagccagcgtcgccttcgatcccttgcttgcccggcccgcccgtgctgagaccccggccctcggtcgagggcggcgcctccaccttctaccggcgcttgaaccggctcagctcgacgagcacgctgacgccatcgtcgtcgtcgtcgccttcgacgccgtcgctcgtctactcgtctggcgtctcgtcaaactcgtcgacctcgttcgtcaccgccggcgaggccgacagccctctttgcgccgacaacagcagcaccgacgacgaaaacgacgaggagcgcacgtcgcatacctcgacaccgacgccaacgctctcgcccctctcgcccggcttcggttcctcggccgtcccgcgcgcgacgcagcggcctcttcgcctccagccgccgtttgcctcgctcaagcgacggagcacgaccggcgacctccttggctggtatttagacgccgagctcgagcacgcagagcatccgagcccacctgcgcccgtcgcgcagagaccggcaccctcgccgatcgcggcgacggtctccgcgccggtcgtcccgcgcattagggagggcgctcagctatgtaacgccttacctgctcgcaagaagctgccctggcgactcgggatgtggcggcgcgagaagtaggcaaatcaaggtgcgctcgcattcctttctcgccgtcgacgaggcgttacgctaactactgcctcccctcacgcacagtcggccccttctttttggaccccttgccctcaaacgacaatggcgacctccctcgatcgctcggcgaccccgccccctctcaaatctcctgtcggaagcttcctctttccctctcttctcgctctccgctctctaatctcacgaccaccatgccctcatgtctttcgtcctgcccctgctactcgctccgttcttcttcccgagttagcgctcgcacattttgtccttcgttctcctgcgcgcgcatcgttttggcctgctctcttcatccgatctcctccccctctcattctctcgctgtagacgcctctttgtagacaacatcactcttcgcccttctccttcgcttttctcgcttttcgatctccctttcttggtctcgttggacacttcatgcccctgttctctcgctgcatttcaatctctgacgcccgactcgcagctctcgacatctgtgtcgtaccgactctctcgccgaacggcaaatgcgttcgcgccagatgctgcgcgcagcagcagcgcgttcgacctcctgtcggtgggcagctcgacgacgcttcctccctcgacactcacggcgcgagtcacaaaccgactaccttttccaacgagatccatatcgagccaacctgagtgactctctctccgcacgacggtccctcaaacccacctcgctcaccgctcgcctctcgtccggcccatcgactttgcctgcaactcactcgtcgacctcggctcgcccctcgaccacccgccttcctccgcaaccctcgtggccgctccaagctcaactttcaccataacctccctcagcagtcagcatgagccagtcaccgtctttgccggctgaggtcagcacaagcgctgacaggctaaccgttgctcgacgttgacgcgcaatgaccccgtctcttctagtcgacctcggagccagctctagggttcagtagcatctaagatgacccggcaggcgatcttgtaatcgacgcgcccttcggcgtgatccatcgcgtcaagtcgcgcaagctctgcgctctcgccgaaggtacgttgccctaatcagaccactcgcggccgacgatcaactctgatcgcactttattcagtcttgcatgacatgctttccgaaaggcatcggcaacataggcaagaagacggccggtggcccgccgatcgtccatgtgtcgtattcggccgccaacatgggcgccttcctctgctacacgctgcacccggagccaactcgtcacgaactcgactataaggcttctaaggggtggttcgagcttctccagctctgagcttgcttgcagcagaacgctgacgctctggtcgcccggatgtcgttcgacccgcctcctcaagccaaagctcgcgtcgccggccctctgcgtttgtcccgatggcaccaaaagaattcgtctacgaccgagattactggtctcagccccgcaaaagagggtttcgagctagggcgcaagaagtctggaagctcaccgtggtcaacaacgacggcaagaagggtggcggcggcgttcggtgcgagtgtaatgagtcgagccacgccaacatcgcgatctcccgccttgtcgccaatcgagctgaccagatcgcctctctccctttctcataccaaagtgccaccctcgagtactatcgcgtcgataagaatcgtcggcacctcgacaacgagcgctacccgctcagcttcgtcttccggaacgacagcttcctgtacacgcgcgtctcgcataagaaagccgcaaccttccgcaagtcgaacgcctggtacgacgacgagaccggcgagcaaacggccgacaacgagcttttcgatatttttttttcgctgggcgaaggcaccgaagcggtcagcgctggagctgcaaccagctcggcggaagcaacagtcgcgccagagggtccaacccgtcatgagcggcgccaggccattggcgagcgagcctccttgtattctgagcggaacagctcgccactctcgacacccagagcctacctcgtctacgacgaagagaagggcgatctggctattctcagcagcgacgggctctgggcgcgcgtacgcggcagtcggcttcaaggtctttcggattacttcgacgaccgactttgcgtcctgtcggatgcctcgctcgcttctcctctctcagtcaacgagaccggcgaggaccttggtctgttcctgcgatacgccttcgggtgccagtcgagccagtcgacactgacgcttgccgaggttaaacggtgcgtcaagcgatgtttacgtctcgcttgcgcagatcaatgctgacttgggttcagctcgtcgcagtctgcttctcctcactgaggtttatcaggcccggctcgttaccgaggcagtttgctcgcgccagctctcccaacacgtcgtcgccgagccgttaacaatcttttccctcgccgccatttacggcgacacttttattgctcggtcggcactcacccaattcggcagcagcatgacgattcgtgacagcccgggctcaggcgagtggtcgattgagggccggctgcgctccgtcgtcgaggtcacgctcgagctctttgcgcgcattccgcacgccgtccttcagcaagtctttcagcttcaggaacggtcgctcttctcgaccaacgcagtcggtattggcccgcctgtggcgtggcccatgctcgcatccgatttctcggttagtcctgcttatcgattgctctccgtctgccttactgacggcttgcatttcctctgtctcagcttgaatagccgccttcgctcggcgcaaccgcccaacgacgtgctcgctcaccttttacgactgactcaatcttacgaccctcctcgccgacctctcagcctccctttacgttccctcacgcccttgccccagcccttctgcgcaccatttcatcccgctgtcttgcctgccgaccacaaatcaaagtccgccaggaggggagacacgcatgattatcagcagagacctggacgacatctgctgcgcatcacttgaactgcaagcgtcgagagggggcgtcagtgtgcgtttgcgccctctgactgacgtatcgacttaagctgaccgtataggtctaggcgagacgcacccagcggtcggcgaacgtgtcgcgatccatgccgtccgacgcccatactcccgtcatcgagctggccggcccgagcgccgtctcgaggagccggttgtaccggtagagcgccgccggcgggatccggaggaagagcttcttgggcatgctgccaaggaagccgctgtgcgccagcttaaagacacccgagatgacggggtgcgagaaaggctgacccttctggtgctcggtctcgaccgttttggccatatgccagagcgccgtgttggctgcgaccctggcgagagctcgccgagcgaggggcaagtcatcgtggattgcggcgacagcaaagatggctgccggaccctcctcgacgagcggcccgggtgggaggagaatgatctgcatcatctgaggggcgtcgtacttgcatgccaggtcaaggacgctttgagccgaagggtcgtgtcagcctgcactcacaaggatgacggccaaatttaagaccactcacaggagcaaagtctgcacagaggggcgtctgggcgctgcacgaaagttgaacgcgtacttcagaaagagatcaacgttgatgctcctctcgtcgatcctgatgagcggaaggccctcgtccgttttctcttgctgtgcgccgacgcttgcctcaaacatcgcgtcaaagacgtccgagacgctgcgaagctaattgagcggatgcgcaagccaccgccgtctgagcagcgcgggacgaggtcgcccgttgggtcgtcgaagaaggaaagcgaggttgacatctagaggcgagcgcgcctgcggcgacgacagagtcagcgatgcacaagtgcggttggctgctgagatgctcgaggtccgtcttacgaacgtcggcttgaggcagctatcgaggcgaggtggaagacaagcgagccggatcagtggggcgatgatggacgtcaaagtcaaacgttagcgacgaagacggcgacgagcatcgtggtcgacagactcgatgacctggacagactcggccggcgtcgataaaggcgtgccagccgcgcagggcaaatcgccgagcaaggtgcatgtaaacgacaggaagcgagctgttacgagagtcgtcaggtgaactgctccgggaggagaggacgtcaggacggcgagtcgccaagatgcagatcgggagaccctggacgcacggtgtaattcttggccaaacacacccactcgctgttagtcgtcgactccagggcagtgctcacgagcaccaggtagttgcgcagcgcgatggatgggatgctgctaaagatggctttgtcgacgaggctaaggaggccgtgcagtccagtgagtctgtctgcggtgtagttactgggagaagagttaaatttgaccgtctagcccatcttggccagagcgagccgagccgttcgaagatcgccatgtatggccgagagagcaaagactgtcgctggctccgtggcaatgcgaccttcgagcagggcgaagatgagggcagtgacgttgggagcctagtacttgtccgccagttggatgattctaaggtgggccgaaggcattcacttgatcagcatgagttgaggtccgaccgacactgatgagactgactgatcgccggtctcaaaagtaagctcatccggtgccgctatcgggttgatagcgtaaagcaagaataggccaacggcatcgcccttgtcgccgagtttgacgtttggcaacccttctttggccttgacctgctcagcgttggcgccggcggtgagcatcgagccaaagaggtcggacgcgccgcggagcttgaccgagcggacgcgcgactcgaggttgtctgacgaaagggggacaagatcgcccgttgggtcgtcgaagagagcgttggcgggcgtcgtaagagggacgaggtagtggttcggagaaggtgcctcccggtcgttttttgtctcgagagtcaggacgggagggcgggagcgggtgaagtctgtcagcgccgcgagacacgcgcgcacctgtccgccgccttcgacgcgcgagctctggtcagccatcgctctcgttcaagtcagcgaagatccgccgccgaccagtagggccaggcaatcgaggaagacggtcacgccatgctagaagacgctgccgaggaggtcttcgagcttccgctcgccctcagcccgcttagcgctgacagctttgagcttgcgcttcttgcgcttgtcgccctcgccgcccgcgcccgccggcttccgctcgacattctcgccgtcggcgccgtcgtcgcgcgggcgcttgccgccggccgcttccggctcggcgagcgactttggcggcgccttgcccgaggcggctgcgcgctggcggcgcttgtcaaggacgcgcgcgagctcgacattcttgaggtactcagcctgctcggccttggactttgagagctcctgcctgagccgggccgtgtgcgagttgcgctcgtacgctggaggaacagcaatgaagcgtcaggctgagggtcgggcaagcgtgcgagtgagcaagctccgactcggaaggtcgacgcacccatctgctcgccaagcatcgtccacttgaagccaggcagatacttcattgtccagatgtcatcgcgccacctgcaggcaaggcgagagattagtagctccgacaaccaggtcgcgctcagctcaatgacgagggaccgacttctcgcccttgtggccaccgatcgtctgggcgttaagcatggctgcggccgactttgcgacctgcttgtcgagaaactcgatccaggcttcggtatagttgactgagtgggctgagcaagggagtaagatcattggttcagctcggagcggggcggtcaggccgccagcagcggcgagaggacgaacccttgccgcccttgacgccggcctcgtccttctgtgcaaagaccttgccagtctcgccccatcggctcatcagatgcttgatcttgtgcggcgtcatgcccggcgggatgcgcgagatgtagacgatcccgggcgagggcccgaccttggccttcttgggccggagggcgagcggcttgcgagtggaggcagtggcagtggcagatgtcgagctgtcagacggctcgcctccggccatggcggtagcaggcgcgggcagggccgaggtcgaggcttcaggtgaggcggaggacatgctggcgagagagaactgaagtcgtcgttggaggcaaactgccgctggtggttgccgtcgaaagcgcaggcaggtcgctcagcgcagtgtcaggctcgacgagaggcgtttaagcctgatgtccggaccgcgcgcggtcccgggccagcgctcgaaacagctccgccgtcgagccgacaaaaggacggcgtcctcttctcctctgtcgcatctcccctgaccaccatccctaaacgagagagatgtcgttcctcgtcccgctcgcacgtcgctcggcattccgcccgcagcgcccggctgccctccttcagcggacgtttggtctctcgctcgtccgctcgcgctgggtccgtatctccttcgacgcgctctgctcggccgtcgagccgttttcgctgacctcggtgcctcgtcccttctacaggatcagctcgtactccacgaggaggttgaggacgcgctcagcacgggcaagccggtcgtcgcgctcgagacggcaattctcacgcacggtctgtcgccgctctccatcgacttcttcggctctctggcccgggagctcacctctcaccctgtttctcttcgtcgcccaggcctgccctacccgctgaatctcgaggtcacactcaagctctcaaaactcgtccgcgaaggtggcgccgtgccggcgacgattgcgctcctcgcgggcgtcccgaccgtcggcctgacgcacgccgagctccagcggctggccgaccccgagattgaggccgtcaaggtctcgcgccgcgaccttgcgccggctatggccttcaaaaaggacggcggaacgaccgtcgcagggaccatgtggctcgcccagcaggccggcattgacgtcttgtgagttgaagctgcgttgttggtcgctcgcgcctggtcactgatcggccgaccatgttgcgtctgcagcgtcaccggcggcatcggttcgtcttgcagagagtgtggcatatcgcttccgaactcttacgctgacaaatttatcgttctacaggtggcgttcaccgcgacggcgagaactcgcttgacgtctcggcggacctgaccgagctcggtcggacgccggtcgcagtggtgtgcgcagggtgcaaatccatcctcgacattggccgtacgatcgagtacctcgtccgtcccagaccgaactttgtccactcccgcctcgtacttcggctgatccaacgtctgcgctttgcctctgcactcccgccctccaggaaacccagggcgtcactgtcgcgacgctcggcaagacaaacgacttcccagccttttacacgccaaagagcggcttcaagtcgccctggtcgatggagacgcccgaggaggcggcccagatgatccgtcgggccccttctactcacccttccttggtcccctcgaggctgacgcgacgccgctggcccacctctgaccaaaacagaccgcgccatcacgctcccgaccccgctcgcctcgctcatcgccgtccctgtcccggacgagtgggccgccgccggtctcgaggtccaggccttcgtcgagcaggccgtccgcgagagtgtcgccgccggcgtccgaggcaaggagtcgacgtgcgtgcctggctctcctgctcgtgttcctccgctcctgctgccgctgactttttgactgctcgttgacagcccgtggctcctcgctcgcgttgccgagctcactaagggctcgtcggtcaagtcgagtgcgtccgcccgactgggcgttcctctgcaatcctcaagcgctgaccgtcgtttctcatcccacagacatcgcgctcatcgagaacaacacgcggctcggtacccagatcgctgttcacctcgccgcactcaaggccggcaagacgagccaggctgtcagtcgcctaccttgatcctccagtcgttcgacgcctcgctgaccgcgatcgaccctgcctcgccaccgcagcagaagccctaccccggagggcacgtcattgtatgagccctcccttctctctggtcttctctccggtctctaggtgtatgttaagaactcttgttgctatcccccggcctctgcagccccctccatacgcggccgccgttgcgcccctgctcgacccaaagatgctcgtcgtcggctcggccgcaatcgacctgacgacccggccgtcgtcggtcgcggtcgtcggctcgaagacgaccgtcccgggcaccgtcagcctgacgcccggcggcgttgggctcaacatggcactctgcgcgcaccggctctcatcagacaaggccgccgtcctgctgctcgcgccgagggcggacgactcgtttggccgcgtgctcgagggcgaggtccggtcgctcggcatgcggaccgacggcctgctcgttgtcggtgacgaggcgcacgccggcgggcggacggctgtctgcagtctcgtgcttgaccttgaaggcaacctcgatggcggcgttgccgacatggagattgtcgagcgcgtcgacgcccagctcgtgcgtgacctcgagcccctcttttccaggtctctggacagagctgactaggccgacggtctctttggggtccaagatcgtcgaccgcatcacctcgctccggccgtcgctcgtcgcactcgacgggaacctctctgcctcgaccctctcgattcttctgacgcattgcgcctcgctcaacatcctgaccgtctttgagccgacctcgctcccaaagtcgaagcgcgtgctcgactacctcggctcgcaagacggcgccgccgtcgacgtcattacgcccaacctgctcgagctccgcggcatccacgccgctgctgacgagcgcgggctcttcgagagcgccacttggtggaagacggtcgacggcctcggcctcggcgaagattggcgaagcgcggtcgagcgctgggctaggcgaagcggcgccggcgagtgggtcatcaacgagggcggtcagtcggttatcggaacgtctctcagaacactcgtcaacccctgctactgatacacgattgtcacgcgtcattcgaccctcagcaatccacatgcttacctcgctctcgcccttcttccgaacccaactcgtcaagctcggcccgctcggctgcctctcgctccggctcctgccagaactgctccctccgtcaagcacgccgacgacactcaatcacggccgactctcactctccttccacccggggacggccctgcccgagggcgcagaactcaacacgaccggcgcgggcgactcactcgtcggcgctgtcctcgccggcctcatccagacgggcaacggccggccggcgagcgcagttggcgccgaagagtgggcccgcgtcgtcgatcgcggtcagcgggcggcaagggcgagcctcgccgtcagctcggcagtcggtaaagttggtgggccaggctgggagctttgatcggacgtttggatgggatgatgcactgcagggattatcatgcgtctgccagcgcagctggtggtgggcctgtgaggtcgatcccgccaaagtcgaacgagccgacggtgccgttccgcggatgttcagccgtccgcccacgccaggcgacccatcgccgccactcgtcgccctcgcctcgacagaggcccatcgcgtcgactgtcttactgacatactcttcggcgagcgccgtcccgcccgcgccccagagaatgagcagctgggcgagcgtcgcgagcgcaaacgcctgctcgacgacgagtccagcctctgcagtcgcttcgagcaaagcgaccgatgccctgtagccgccttcggggtcgctcgcaaagcagtcgtcgatcgtcgctttgagctcggccgcccgctggcggacagcgtcggcccgtgcgaagtcgacggtacaggcctcgcactcgcacaggaagccaaagctcgagagtagccaggcctggcggtcggctgccggctggaggagccgcgcgccgaggtacgagatggtaacctcgtcgcccgcagcgtgttcccgtagagcgcggacagaaagcgtcgacgacggcgaggcgtaggaagcctcggctgacggcgtacacgaatgattgagccgtgaggcgacagggaagatgccggacctgagcaggcagaatacgatcgtcagtcctccacctcgacctcaggagcaggaggcgacgaccagcgtgccccgcctgggctcgggacgcactcgttcgggccagctggaaggacgttggtctgcgcgtggcacagcggactgcagatcagcgacgcgctctcattgctagcagaggctcttgccagcgcagcccaccttgaagatgcccattagcggagtgacgtcccgctccttgcccttcgagttggcgagaccgaggtacgtccgcacgccgtcaggcccgagcgcccggacacgagcgtaaagctcctccgggtccttgacagtctgcggaaggacgaacagcggcttgtcggcgaggacgagcgtgccagggtttaacggtcggctggcgatgagcgacaggccggagaatggcgtcgggcggagtccgtacgcggcggcggctggcgcggcggaggctggactggcggtcgtcaacatgcaggcgggtggtggcaggcagtcgctaggcgctggtcgtttaaaggctcgaagctgctcggctacctgtgagagagatgacacgagatgatactggtcggcgaggcgagagctcattgctcctgctggtcaggtgcgctcggcttacattttatatttctctcgtgcccgcgcgcggggcgaccacaccaacgtgccggcctgacgacagacggccgacgggaggcttctctcgcccacctcaacctctcaccttccacccaacccttctcccaccgccatgcctgccgccaacgacgacagctcgacctggtcttcagtcttctcgaacccgttctcggacaaggtgctctcgctcctgccgggccgcgataaggccaaggtgtccgccaggcagcgctcaacgaggcagaaccgcatcccggacgtccagtgcgtcactctctctcgcctcgcgccagcatgaagacgacacctgtgctgctggcctgccctagagtgcttgccggtcgaaactcgacgattgacagcccagcttctccatcctcgccttccctcgttgcccccgcccgcagcgtccgcgacggcgagcagcagcccctgctgtccgacatccagctcccgggctcgtccgcctcgtattctgccacctcgaccgcgaaccagcagccccgggcgtcgaccgacccggccaacctaatccgcgtgccgaaaaaggttgcatcggttatcaacgtcgagcccaaggtctggttcgccaacgagcgcacgtggctcgcttacctgtcgattgccgtcctcctcggcagcctgagcggcacgctctttgccggcagcggaagcgaggctcacaacggccgtgagaaggtcgtcaaggcgtttggtagcgtctacggcgtcctgtgcgtcgctccctccttgctcacggcaggtcgtctgcgcctggtcgccaggctgtgctgcgcatcatctgcaggagggctgaccggaatttactctctttgcacgctccagcgccctcctcgtcgccgtctacggctacgccctcttccagaagcgggtgacgatgatcaagcgccggtcggcagatgcgtttggtgagtcttagctccgctgattgggctcggcagccgaccaggccaaggccagcgcctgtgtgcgagcttgacatctgacgagtctgctcctgtcacctttttctccagacgagatcttcttcccggtcgcgattggcgtcgccatctttagcgccatcctgaccaaccttgtcctccgaagtatgtcgaccttctgcctgctggcacgcgcagtgcaacctccgatttgccgcaaaggacgttggctgacgagcctcgtactctgactctcgccagtcatcgacttccgcgagcacctcgcatcgcacgaccaccgagccggccacggccatcaccacaaccagacgacgtccttctgagacccttgcgtccgagcgaggctcagtcttgcctcaggccagcgacggctagcggccgtggttgcacaaggcctttggatggaggacgtaggccggcgcgcctggcgtgtctggcaggaggagggatgcgcatacatgtatcggttttgatcacttgcgcgtgctcgtaacgatgcaaagacgccctggcgagagccggctgccatcgtcccattctgctttgcgctgaccgcttcgacggccgactgaaggggatcgtcgaggcagactgacacgccgaaggctgttgagcatgttgagtctgttggccgcgttgagcgaggccaactccgcctgcgcgctcgctcgcctccgctgccgaccgtccatcggcccggctctagccctcgctcatctcttcatctcatcttcatccaagctccacttcaaggccggtctttcgcagtggctcatgaagatggagctgcctctgaccgagtctcccgactgcagatgcccgccaaccccctttatcacaaggaaaagggcgatctcgtcctcctcttctcggacgacctcgagtcgcgcgtccgctcggtcaagcttcgcggcgcgtccgacgtctttgactcgatgctcaccgccggcgccaacgccgagcaggtcaaggccaaagaagggttgccaatcgtcgagctcggcgacaaggccgacgcgcccggcctctgcctcctctacgccatcaacctgaccgcggcatagaagctcacgaccaaggcgggcacaaagtcagcacagcaagagtatgcgaggccttggcgcatgctgatcaaacgagacgtcctgattgcatttccggagacctccagcttgcggacaagtacgaggccccaatagtcacggcgctcgtgtttgctttactcgccggtcacatctcgaaggagccggcaaccgtgttgctctctcaaccatccatggcgatcttccactggctcggctcgctctggtcgagatgggccggacctggatacttgaagcctggacgacttaacattgcgccacaatccatgggctacacggcctcctcagcgacctcgacaaggccatctttgcccgtagctccgccaaggcgttgtacaactacctgaagctcgcgagcaccgtcctgttccgctcaagggatggtaattgggatgaattggccaagaatcatactgtgtgtttaggttctgttccgcagcgcagcctatcgccgtcctgacacgctatgccccggccagttcacctgtcggctcccgtcacagctcgcttcctgtagtcttgatgcacttttgcccgacgatttgccctgcgtggctgttacaactgagatcggcgtcgagtccatcagtgccgcgaggttctcgagtaatgttcatcctaaactcataagcgggttggccctcctgagtccgacgctgcgttgccgctcctacccgcacgagcggcgacgaacaagtcgtcgatgtcgtcttcgtcgctctctccaccagccgacccgcggccgtcgtccgagtcttcgtcgcttccgccgacaagcccccgtcgctcctcgcgatactccggctttgcctccgtcttgcgcgacaggtgcgggtaagcgtcgcgatggctcgtcgagttctcgcgcgaccggctgatgggcgacagcgcgtcgtcgttgcctcgacctcgactcggccttcggtcgccagacttacctccgatcgggagcgtgtgacccgagtggccgaggtcggagccgtgccgcacgccaaggtcatcggccgagtagcggtcgcctccagcgttatacgagtcgtgctcgaatcggccctgtgattgagcagagaggtcggccaggctttgatgaaacagagagagccaaacggcgacgcacagcggttggaggcgcagacctcgagaagccctgcgacggcgagccggtcgacggcaggcgcatcgacatctggcccggtgagaggctgtagtcgtcctcagggatcgtcctgatgacagggtccaacgcataatcgtgggcgacgacgctgttgttccggcttgacgaacttggtggcgggtaagtcgagtccgtgtgctgctgacgcgagtggacagcctcttcggggtggccggcgcggccgacgcggtggacctgatcgaccgggtcgaagcgcaaggtcggagaacgcaagctggccgggtcatcgccggcgtcgggatgcagcgagttgtatcgctggagctgctcgtggtacgcgtttccggcgggcgtcggtccgtctgagagctgatagcgcgggactgaggtgagcgagaaggggtcgtgcgggtcgaatcctgatggagcgcgtgcagtggtaagcaatggcgaacaagcccgactcagaggacaaatggataggacgcaccctgagagccgtcacgaccgcggttgatggagctgcgcaggctgcttgctcgacgcgaccgagcacggatgatcgagccgaccgtgccaaagccgccgcgcagagcgtcgacaccggctgctaggcgaaagaatcgagcgtcagcatcgaggagtcaagcgagagtaggacgagattatgaagcacggtcttccatgccggcaatctccttttcggtctcgtgcgtaggctcgcgcgaggcacgcagcaagatcgtcgacctgcggtcgagcccttcgagcttctccgggtcgactgcgagaggcgaggcaagggttggtcagcatcagcagggatagcgaggcagctgacggctgactacgcgcacccttgctcatctgcaggatggtgatgccgacgcagatcgtcaagaagccgagcacgatggtgatgatgccgacggtcgtcgtcttgagaccctggtagaggacctgagaggtgagcaggagagggtgagcaaagccagtctgaaagttgggcgcaatctggcgacgcacgatggaggagactaggcgatcaagggcgaagcttggtcaatactggagcaaggcgcaggccacgaaacgagtcgcacccagggtgcagaaggtaaagaggactgtaagtcgatgataggaggtcagttatggctatgccgaccagatcaagctctgggaacgtgccgtagtacgtcggcgtcaccatcgccgtgttgaacagctctagtgctttgttgaggtaactacgggcagcggacggtcaggaaagtcgacagcgggccgcaggcgtcgacaggttgcgcacttgatctcgatgaggagcgtgacgactaggaaaccacaaggcatagcgtcaacggccgatagactcagacgagctgagcgagaatgagaagggcgactgaccgacaaagacgaagagaaaccaaaagaaccagaacgtgaccttcaagagttgtgatgaaggatttggggtcggcttctccgcacaaacaaagacaagctagaggaggtgcgcacctggttgttgcctcggattgacgtcaggatcgcagcgccgaggccctgcgtacagctgaccgagaggccgccaatgaccgagcaaatgccgatgtggacaagcatcgtacgcttgccgtactgaagcagagcgatgaagggtcagacgtggcaagtaaatagtaagcagaaggacgaaccctgggctcgaagtagaagacgccggcgagagcgaggaggatcatgacgaccatccaggcaaggaagccgggggcgatgaagagtttcatgaacggcctgatctcggtcacggcctgctgctcgggtgcgttgagtgcgatgacgatgctgccgatgatacagaggagacagccgagccagccgaagaacgtcaaggtctcctgcgggccggaagccgtcgatgaaaagtcggcaggtaagacgcgctgaggcatggctgaatcagaaagacgcaccttgaggacaaagtggctgaggatagcgcagatgacgacgctgagtgcgccgagcggtgtaacaaggactgcggcagtgaagctgggagacgcgcccttgcgtcagctcgcagcagcttgcaaactggcgcctgcatcgctggacgcacctgtaggcgaccaggttgcagatctggatagcagagcgaagactagcgtcagccgtggcagatgtacctcgcctcatagtaagcaaaacgcacctcgccaacgatcatcctgtcgcggggcgaaagaggcagaggccgtcagcacgcgcgcgcagccgagctagcgaaacaggacgaggctcgccgcccgacgcacatgatcatgccggtccaccagagcctacagagagggagaggagagccaggttcagcttcggagtgactgacatcacgacctgtgaagccgtctactcaccagtccttcaggtattggtggccaccctcgccagcgacgctgccggttttggccagcgacctcaggaggcctttcttcttaacgacgaagctcgcgccgataaaaaagcccgacgcgatggcaaggatgaggccgataattttgaacgacgccggctgctcgctatgtgaggttgcagcggacgctgaagccgaggcggctgagctcgcgctcgcgatgacgctcgacatgctgagtgacgaggctcctgccgtgactttactgtaggagggcagcgaggcgttcctgtgtcaactagcttccctctcctttaggtcggccttcataagcttggtactgacaatagtacgggccgccgaaggtgctgccgtcgggtcgagctgaggaagaggcggaggccgaggaaggcgagccgcgcgctagggcgaagttgagaggctgccgcaacaagaaactcggtttgaacggatcctcgagtacttgatcgacaggaaggagagcagcaaagacgagcctggaaataggagttaaggatggctgtcaagaggcagcagagggagcgcgtcctgtcgacgacgcccggcccgccttctcgcgcgggcggaggcgctgcgcacgcggtcggagggactgtcactcttcgggctgagctgaaacggggtgtctttgcctctgtacaaacttacagcagttacaaaaggcagtccagctacgtgaattagctgcatagctggaaacctgtcgcgcaggtcgcccgtcgcatgatagggcagcccgagcaagctgccgccttttctcgcgcgcagcaaaccggcctctcgacgccgggcttcggccagcctgccttccggctgagatgaggcctcctcgcaggtcatattgctgcagcttgaccgaagtggattctagcggccaacaattacttgcacagtacgatccctttcgaggccaggttccgaggtcggctcgcagctggcaagcaggcgaacaagagccgggcgcctcctgaccttccagccccccaaccaccatctcgccgccaatcttcgccatccatctctccctccagctcactcagcccatctaaagccatgtctgacctcgtcatgcaggccaaggacgccttgacgtcgaccctcaccaaggtcgacgatgccctcacggccgccgcgccgacctcggctgagaccagcaacgtccccgaccccgtcaccggtgctagcacggcggcgcggccgacgcctgtccgcaagccgtcgtcgccttccgaggagaagattgcggctttgtacgaccaccggaaggagcacaaggacgagctgcttaaccggggcgtgctgaagggtgcgttgcccgcccgttgaccgctgcatcctcaacggcctcccttccgaagcagcgagacagagctgacggctggactattctcttctccctcagatgacaagattgctccggccctgcaggccaagcaggaggcactgaagcgcgctcagctcggcgtacgtccccgactcttccctgcctggtcccggattgcttccgctgcgcgcgtgctcactttgctctcacgatccctctcgccccacagaatacgctcgagtcgcagctcaaggctcggcctgcgcccgaggagctcatccggggcggcatccttaacggtgcgggagacttgtgacaccggttgatgctagcgtctgactgacttgcgatcgtccgctgctgttcgactgaacaccctgcagaggacgaagacccgacctcgccaatctgagcccttgggatcgcctagcacaggtacacgagccttctgcttgcccttgctcagtgctgtcgatccataccttcctcgacatcaccaccttgatcgctcagctttctcctttccttcagcctcaccccaatgccccgccacgccttcgccccacttctgaattaccttgcttgcttgtatgatcagtctgtgccatccttctcctctttgacgatttcatgcgccaccttgcacgctgagcgagtcaatgtgaagacgcagacacaaccttggaagggctgcgcggatgccctgcgcggccggctctgctgcagatgagctcgtcccggcggtctcgttgacaactctagcatccacccccgcttcgtcctactaagccaaccactatctggccctagttctcacagcggccgccagaacctccccacccgtgtcatcatctagatcgctcgcgcctgtgatgtctgcctcgcccgcgcccgccggcagcccgtccggctcagcctcgcccctgcccgggccgagctcgtcgtcagccagcaaccgctacaacctctcaccggccgaggtccagcggctcaaggtgcgctgccagccctcgcgacgtatcgtgcctgctcgtcttgcagggacgatgctggaggctctcgcggtggcctgcggctgacccgaccgagctcgtcgcccacccgccttggctagcttgaacggctgctcaagaaccccgacaagccagtgtcgatcccaaagccggccaaggagaaaacgctccggccgccgcgcgagatgatgaagaacgtccagggttcgtcggccggtgcgggctcgggcgagtttcacgtctacaagcagaatcggcggcgcgagtacgagcggctcaagttgatggacgagaaggctaagaaggtgcgcctgtcgtcacgagcatctacgcgagcttctggaactacccagatttcagaacgtctagctgaccgctgactatccttctctgtgtggctcaggacgaggagcagcaggcgtttgacgagcggcagcgtgccgcgctcgactcggcggacgcgaagacgtccaagaaccggctcaagcggcaaaagaagaaggcacgccaaggcagcggcaaggccggtggcggcgacgacgacggctcagctggcccgggtggcgctggcgaggccggcgccgacggcggggcgggcaagaagcgcaagctcggcggcggcgcggcagcgatcgtcttcaagcggcctggcgaggagtcgtcggacaacgaggacagtgccggtcctgtgtcggatgaggacgaagcagaccagccggaggaggctctaggagtcgaggatgcgcccaaggttgtcgtcaacgagcagccgatgattatcatccacgacgactgatggagacgatcgcatgccgcctgttgtacgacattgctccccgaaatagtgagatccgaaagcgcgtctagtcgtcaaggggggtgtcatgatcgggcgctcgcctcaacgggcgcacgcgggtcgtagcagggcgtgagggagcgggtggcacgcctaaggcgtcgcatagtaaggcagggcccgcatctgagcgtcgaccgcccgccgaaattgtctgcaagagcgtaaatagaggtgttagcctggggcttgatgctcatcgtcgaatgcgggcgagctgggcctcactcgctgtcgacgccctcgcgctcctcttcctcgaggtacgcccctcgcttctctggattgcccgtcacccagcggccccaggcaccctcggcaccccagagtgtccggaggacggtccggatcagggccgagtcgacgttgggcgacgttaggaggacgaagcggacgtttgtcggcgtctcaaacaggtgcatcgcgtacgccggggtcgcgtagctctgaaactgggacgtcggtctgccgggccggaccgggcagcgaggcgaggcgaacaaatactggtcagtcgacagttgacagcgccagagcagagcaacgccagacgcacgagcccgtaagcttcttgaccatgttccgcaagctgaggacgacgccgtagacgagcttggcctcctcgtcgaacggcagaccgcccctccgctggttcgcaccggccgccatgccgccctcacggccctcggacagtggcacgctgaccgagggcgagacatgcgggaggattgcgcctggcggcgctcgtgtcaggggcgtccgacggtgccagtcttggtagtagatgacctcgcaatgcctgcgaggcggcgaaggcacgagctgccggtcagctcgagagctcgcgacagagaagggtcgccgagcttgcaacagaggcgagcgaccgaccttgagaagatatatagcgagtagatcatcttggtcgggctgagacttcagacgagcgagaagggaggcgaggggcgaggtgcaccaagggctgaagatggtcgttcgcagcgcatcagccgcagcgcaatctagcgctgccgggctcgtccaacagcttggtctctggccacaaagagcgtcactcctttgcggttctcgtgacaagtgagcccgctggacttccgacgctgagcccacgtccaccggactacggtcaggtaggcgcgggtgcaaccctctgtgacgctaacggccgacccctcgttcccctagcgagcgagccaatgtgctagccaatcgtcaatcattacatctcccgacgtctgcgaagggaggcctctctccagttgtacacgccagccaaccagcggccgtcctctgtcgcggcaggggccgcttagagagggggctggggcagctgcgtcaggaggacaccgaagcgcttcttgatctgtaaggggggttagcatggcggtgagttctcctgcatgagagagcggctgagagttgcacggggcggggacggaccgtcacgcggtgccgggaaaacttgtcgtccggcgagaagcgtgctgtcataggcgaggcgagacggtccagtgaggtcagccgggacgagctgaggccaaggcgagcagcctacaggcgagcgctgttagaaggaagctggagcgaacccgggtgagcagacttggcaacccgaccggtagcggtgaccttctactcgtagcaatggagagcatcaggtcagcgagctgcgcctgtcgcaggtcgaaccaagggcgtaacagagacggaccttgagcgtgtagaccctgagcgagcgagagtgcagcagagattagcaaagacgaccttgatgatactcgtgaggccagctgcggtcttgtcgcccagacgcaccgcttgccagcgtcgtcgacggctgcaggaggatcggaggcgcaggcgggtcagcggccggagccacgctggtcaagacgagcaccctctcgactcagggtcactcactgtacataagatgcatgttgaagaaggtgccggtgcgggtgagagactggaacgagagagtgggttggctggcgacgactgctggagggcgagaaggagggaccaggtcgagctcggcggcggctgccagtttccaagacgggcggccctgttgccagtgcatcgagcctctgccaatgaatctgggctgcgcgcgaccatcgcacgctgcagacggccgcctgccggtctgtccctgccactcgcttcttctcgcacgacccgacatctccctttgcatgccagctcgggtctgaaagacacgcccagcctcaccctctctcagttcttcaactccggcatgaaccctgcccgcagtcggagccagtcgtcggcgggcacgatccgggcagccggccgcaagccgccacggcccaactcggacgacgacgacgacgatgaggacgacgaggacgacacctttttcgactttggcgccgaagctgcgacgccgacgtccgagtacccgcagaggctcgaggagctgctcgcagctgggacgtttggcatccctgcagccggcggcggacctcgagcggccgatgagctcacggtggacgacgacaacgacgccggcagcgacggcggcttcttttacaacggccgtgacggacccgattctgagctgcaggcctcgcgcctggcagagtgggggctcgaggcggacgagcaggtcgacgagaaggtcctgcttcagcgctacagccgcgagatgaaggacattcttggcgagaagcaggcccgtgccgaggatgaggacgccggcgagctcgaggtcgagggaatcaccctccaagagaacgctgcaccagtaagctctgatcagcttacgtcgggagcctactttggctgacgagccttcctcgccgtctctgcagtcctccgaacgaagcacgacggccagtttctcctctgcccagcgcggcttcaccgagcatctctcggccggcgtcgcctcgccagctctggcgacgtcacgcaagccctccttcctcggccgaccggccttccttcgtaagctacctctcatcccctcgaagcgcccccggatcatgctgactcgcctgcacgctgtgtcatctggctcgccacagacccgaccgtttcgcgcttgcggtcacataaccgcctcgcctcgacttcgaccgtcaacaccctctcctcccttccgccaggcgcccatcatcaattcggcgtgtcctcgcacttctcgcagctatcgcggtccgagtcgtcgtcgaccatcaattctgtcctgtatccctcgggtgcgcctggccgcgacaccaatggcgccactgccgtgccgtcgaaaggacacgagactcgccacgcagccgagtcggaccgagacgaggacgatccgtttcgctggtcggtcctccagcgcatctcgctcgcgctctacccctcaatgctgccagcgccgtccaagtcaagcgcaaagctcgccgcgctcgctctcggccagctgctgccgggcctgaaacgcgagcagctcggtcggccgaccaagatggttgcggggggacttgtctgtgtcggcatgagtgcgggctgggtcggcgtctgggacttcaggggcgagcagaagggctggtttggcaacgaggcgcttcgtgagtgtcttcgactcggcggcggcgtgtcgtacatgtcgctggcagtcgcaaattaacctttcacttctttagttgcagaggccggagcggtgacggcgctcgagctcacttcggaccacacctacattgccgtcggccacgcctctggccacctctacctctaccacctcggctccgctccttcgaccccggctcgctcggttgcgccgatacctctctctgacatccgatccggccgcaaggagggccatctgcgcggcactcgcatcctgcacgtcggcttcgtcggcaagcgccacacggccatcatctcgggcgacgagcgcgggatggccttctaccactcgctcggccgcgtcctcggcgtcgactcgaccgacgtccttcggatcctcggcagctacccggagcctacgccgccatcgacgccgacaggccagccttcgtgggcgccaaagcgcaaagctccgacgacgctcttcgctgccgctcctttgcctctctcgccggatgcaactcatccggcagacgcgttccagttctcagccctcctcacgccagccaagctcgtcatcgtcggcctcaggccaagcccacggacgtggtttcgccgcatgcgggctggcgaaggcggcgacgggcccgaccggacaggctcggccgtctggcggccagcgcacaccggcgtcgagccgacgctcgccttctcgtggggctcctccgtccgcttcgtcaagtcggtgcgggtcgctcgggatcctgacggctttcgtacaggaggcgccgcgctaggcaaggacgggaccgagctggactttgtcgaggacggccgctgggaagcgaccggtactgtgctgggaatgcagtggcagagccagacggtgcgtcacgccttgcctcatcgtgcgttcttggttagcttacaagttgattgcctcttctcgcagcacctcttgctcgtgacatcagttggtattgaggcggtcaatgtcacgacactccagcgggccgagcattcgtccttcgataccaacctgctcgtcacgagcgcaggctcgaatcagccggccggtgtcagcgtctacaagggcaaatcgtttttcctcgtacgtctcgcttgcgcaatcacataagcaggcatgcacttgggaggctgaacccgacccggcctaacagactacgaccgatgtgcgcgtcgcgactgtcctcacttggacggatcgcatcctcgcgctgatggagtcgggcgagatcctcggcgcaattcgcctgacgaccgactactacaccggcgactttaccaacaccctgcttggcctgcccacctcggttatggagcgccggcgcgtcgtcggcgtccggctgcgcgagctcctccgagcctcggttcgctacacattctccgaggaccgcatgacggacggcacgcacgagtcgaacgacggtcgaggcgtcgatcggacgacgctcttcgagggtctcgcgacgcacgcgacgacggcctgcctcgcgctcgatgatctcgacttcctcttcgaggatgtctttgaccagtaccagtcaaattggatcgacggcatcttctgccgccagctcgagccgttcgtcgtcgacggccggttgcggacgctgccgacgcagatcgcccagaagttgctcgagatccatgacgccgacggcgatcttggggcactcgagacgctcgtctggaacatcgatccgacctgcctcgacatcaaccaggcgatccagctctgtcgccggcaccggctctgggacgcgctcatctacgtctataaccgggcgttgttcgattacgtctcgcccgttgtgcatctcatcggcctcatccggacgatcctcgagcagcgtagctcgcggccggcccggctcgaagccgtcttgccctcgttcgatcaagaggctgaggagctcgtgccggacgcctacaagatttttgcgtacctctcacacgtcctcgccggctcgacctatccaactggcgaggcgatccctgaggcgcagcgcccggccgctcaggcttcactctacgccttcctgctcagccgtcggacggccacctcgccgacgaccggcgactatgtcctgacgagtttgacacccaacggcgccgagccggattacccctacctccgcctactgctgctgttcgacaccgagtcactactacacgcgctcgacatcgcttttgaggacgccttcctcaacgatgaggaggagtcggacgagacaccgacgagccgacaggccatcgtccaggtcctgctcgaggtcatggcctccgacgccttctctgcgagcgacggctcgatgcttcacatctttgtcgctcgcaacttgcccaagtacccgcaatttctccagctccctcagccgacgctccacggcatcctgtcggccctcaccgacgacccggatcagagcatgcgcgaggatcgcgagctcgcggtcgagtacctgctgtcggcctacactccagaggaccggctgggcctcctctcgcggttcgaagccgccggcttctaccgcatcttgcggtcaatctaccggtctgagcggcgctggccgtcgcttatcaacgcatacattgacgacccagaggccgacgacgacgtctttccgagcgtcgaagaggtcctgcgggcagcagcgacaagcggcgcttcgctctcttacgacctgcaggtcacagttatcgacgtcgtcccgcgcctcgccgacatcagcgtccgtcaggtcgcagcgctcgtcgaccacttcctcccatcagcacacgaggacgcgctcgcccggctggcggccaacccgcgtcagcagtacggctacctccgcgcgctcgtcgagccgaccccgaccgaccctcacgacgaggcgatgtctgactccgtcgctcccggctcgagtctatcgtcaccatcggtccgactaccgctcgcggcgcgcaacgcctacgtcggcctgctctgtgaacacgaccccggaggagtcgtccccctgctccgcggtgcgccttcagaatacttcgacctggccgaggttgctcgcatctgtgaggctggcaaggtgcccgaggctgtcgtctgggcgctcaatcgggtcggcaaaaccaaggctgcgttcgagcgggtcggccggctcgtcgacgagtcgggtttaagcatcgccaaccgttcgctcgacgagtcgtcgtcctcttcggcccaacgtcgcggatcgcaagcggccgcccccgagctccaggatctccgcgacgtcacccggattgccatcgaaatctgtctcgctcgagcagacggccgcgactcgccaaccgacctgccactcgaggacatgtggttcaacctgctccacccgctgctcgatctcgtgcactccgtctcggcaagcatgcccgatgcggctcaggtgccgagcacgccgacccttcggtcgctgtcgatcgacgattcgttcggcgccgtcgcgcacgaaccgcaacagccgacgctcctgacagccctccaatcgctcgtccaagagtcgcttgcgtcgctggtgacgtcgtcgtccgactcgagcccgtcgttcccgcccctgttcaaacggctgctcgatggcgcggcgaccgacaacggcaaggcccgcgggtcgtacggccagttccaagcaatcatctccggcatgctcgatacctccaagcaggaggccgagatgattgccgtcacgatccgcctccttgagcaagacgtttttgatgcgctcgagctccagacggccgccgtcggccgtggctggcaggctgttttgcctaccctcgacggggacgaccagcgtccggccctgacgctgccgtcagacgccaaggctaccggcatcgaatcggccaggccgcaggtcgtcaccttccgagcgtatcgcaacggcgacgttgagcagctcgggcacgagtcgccggtcctttggccgccgagcgcggcctgagagctttcctctctctttcattttctctgacgcccctcacgccactgttacgacctttgcacgatgcattccttcatctggtactgccagcactggaccgtttttgataaaactgcggcttggatcggccaggctcgcgtgagggacgcgacggagcgatgaatggcgctcgtcctccgcctggccaagcacggggtggacatgttgccctgaggttggcttgccctggaggcggagccgccaacggccctgcaggcaatcggcactgtcgtccagcactaccttctctcgcacgccagcccgaaggcattcaaagccatattttcctgagcggcgcgccctcctctgatgcgtcccgcttactctccttcttccctcacgactcacgatgcctgtccgcttccgatcctgctgttgtagccccgccacccgtgtactcccgtctggatcctcatgccctttcctcttcttgcacgtgccgtcatctcgcacggagctcatcgccagaggcgggtcgtgaaggttgccgatgggggacgtcatctcatcaggcctgcacgttgcggacgaacgacaggacgcccgacgagaaggcgcagagctcgccgagacgctcgccctcacggacctgctcggcccggagcgcgctcagcggctcgcggagctcttcgccgttttggacgaggacgtcgccgtggatcctgaggaagacggcaaggaaggcctggacggcctcgaagtcgcggtgcgagcgcaggcgctgggtgagggcgtggatgaaggcagcgaggtggtcgagcgagacgagcgaggatcggagctcgagatcggttgccgaaggcgagagcgacttgagatgcgtaaagaaggcgtcgacttcgggggcagttcgaggaacgatgtcagcgccggacggcgctactgtgtcacgaggacgaccaaaaaggcctactcacagtcgccgtcgacgttttcactcgtcagccgccgtgtaaactcggtctcgagcgagaaagagctgtccatgaagcggtgcgagtccttcttgccggcggccccgccatcctgcccgtcatcgttggcgccgagctggtcggccaggctgactcgcggctgcggctggctgtcgctctggagcgagggaaggaagaagggcgcttgctcgggtgctttgggcgcctccttgggcttattgcgcgccttgatgacctcgaggttgagaagcgtctgccactttgaccgaggcagaagcgacagtgtcaggagttcgcccgagagctgatccggcgtcaggtagaggttcttctgctctggcgcgccgacgtcctcgacaccctcgagctctgcgatgacggaaggcaaaataggaggtcagcgccctgcgttggtagcgatcgcatgccagtggacccaccatcgttgtcctcgagaccctggactgtcggcatggcaatctcgccgacctcgccctcctcgatcgctcgcagcgcaacctcggagaactgggccttgttggcccaaaggtagacgccgacgctgtcggcgtgggccgttgcgaggaaatcgcccgtcggcgagaaggcgagcgaggtcgggatgctctcggttcggaaggcgtcgacgagcgagcccgaggggacgtcaaacgtccggacgaccgagtcgaccgaggcgacgatgacccatcgcgagtcgggcgagaaggcaaggtcgaggatgcgcgaggggaagccgcggaggtcacggacgaccctccgcgtctcgatatcgacgagcagcacccggtgcgggtttacgcatgagacggcgagcaagttcgagtcgcgctggagggtgatggccgagacgatcccgcccgatggcgagtcgagtgtcggcggcaggccgagcgagtgcaggtggtgggtcgaatgaaagtcaaaaaaatcgacgaggccgtcggcaccggcggcgacgagcacgcggttcagcgagtcggtcgcgaggccgacgaccttggcctcggacgggagtgcaaagttcttgcgctcgaggccagactggaggttccacatcgacaccttgcccttcgcgccgccgacgaggccaaagttgccgcaggcggtgacgcagacggcgctggcgacgtcggccttgccgcccggcgcggcgagcgagaagcggccgaccttgcagtcccggccagaccatgttcgggcgagatggttttgcgcgcctttggtgccgatcgccgagttggccgacggctggtgggcagagaggatgtcggcccagtcctttgagcgggcggtcgaagacgagagggccgttatcggcggcagcttgagcgattcagacgacgacagcaggtgctgctttttgctccctaggaaagtaagaaggggcgccggtggttgtgtcagcgacctgagcgagggagggagaagcagcggccagccataggtggagaaggcaaggaggatcagacggagaataaaacttgaagtcagcggtctcccgggaggagacctcagcttcattaaatcagtttggtgtagtttttggttgctcatcatgtgtcggttggctacggccgcaccatgcgcgcgaccggtgacaaccaatgaagcgggagacaaagatcgtacggggccagaagcagcagaagatgcgcaccttggctgatctccctactccgcgagtcacggacgacgctcgtcatgcgcaatgcccggtcgacgccggcagtcaggatggccttgccgtcgtcgccgtagtagcggatgaggcacggcggcgcccggtggccttcgcggaacttgagcagcgacggcggcgacaagggcgtttcaaacatccattgctgcagggccggaaaggtgtgggttccgcgtcagcgcttgtcactcttcatccgaggcacgctcacgggcagcaccgcgcaccaacagaaaacagactgacccggatggcattgtcgcctccactcgtgacgagcaagctctggcccggaatccactcgactgtgctgacgccgccctcttgcgcggtccggacgaggtggacaagccgtccccgggcgtttaggtcccagaaggcaaggtcgccgtcttcgctgccggtcgcgaggattggctcgccgtcggtccggaagccaatcgacgagatggcgccttccatccggagtgcgaggagctcctcgtcgagccggaggtcgagcagccggacgaggcccgacgcgtagccgacggcgatgacatcgatcgccggcgactgagcgacggcggtgacggcgcctgcggctgggctgaggccgaccggcggcggggcgtcaaacgtgaagagtagggtgcgcgtccggatgttgtagagcgcgagcgcgcccgaggccgaggcaaggacaaccttgttcaggtaggtctgggggtggatgatgtgagttgccgagaagtcggccgggagagggatcgaggtcgagagctctgcaggtgccaggtccccaattatgcatattgaggtcagtccatgtccctcgaccagaagcaaggtcaacagcgccactgcaagttctggacgcaccagtcgtttcaaggttgaagatcaggagctcgtcgccggcctcggtcagggcgaggagctgcgtgccgaaaatgaggagctggttgatgatcgagtcctcgcttggggccgtgaagcggtcgacctgtcgtgcgtgccatatcagcactggcgtgagctttgagtcaggcagacggcgaggctgacctccttgccacgctcgaagcgaacgacgtgcgggccgacggcggcgaagacgctgtcgaacttgatggcgagcgcccggatctcctgcccgaggctcggaccgacaaaaagaagacccatattgtcgccatcccacatggcccaagacgagccgagggacgagacgatcgtcaccttgggcccctgggtctggcgggcggatgaccgagcctggacggcgagcgggagggcggtcgtgatgaagccgagcgcgcgaaagggcgcgaagagccgagccgtgcgggcaggtgtcggcttggaggatgaggcgaccggcgaagccggagctttgacccgcttcgcagggcgtgaaggagaagaggccatgctgaggaggaggaggaggttgggaggggcgcaggtcgtcgagcaggaggaggttcgaggcgcagttcacgccgaaattcggcgatgcagggcgacagggccgatccaggcgggatgagagccggctcggccgctcgcaacgcacctcctcgacaccctccgacccaccaacgcccttgacatcttctctccgcctcatcatgtctgccggtacgtacggctcgagatttgctctgggctgcggaccgctagaggtcgccgctgatcatcaactcctcaccgcccctgcagctgccggaaagctctcgcgcgaggagtggcgccgccagaaggacctcgacgccgcccggaaggccggaaccgtccctgccgaggtcgacgaggagggccgggcaatcaatccgcatattccaggtgcgtctgatcgctgcacgccttcgggtgctctctgagggttctggcggagctcttgggccctgcacggagtgctcgagctcgagacgctgacctctccacctccgcctcgtcgtcgccagagtacatcaccaaggctccttggtacctcgacaccggccggccctcgctcaaccaccagcggatccccgagtacaatgcctcgtcctctaagctcgacggctggtacgaccgcggccagacggccggcccggccgcgaccaagttccgcaagggcgcgtgcgagaactgcggggcgatcacccacaaggccaaggactgtgtcgagcggccgcgcaggaagggcgccaagttcaccggtaagggcatcgtcgccgacgaggtcatccagaacgtcacgggcgactacgacacgaagcgcgaccggtggaacggctacgacccggccgagtacgccaaggtctatgaggagcatcgcgcgatcgaggatgcccgaaagaagatccgcgaggaggagattgacaaccagacgacgaccgacctcgccgccgtcaaggctgtcgccaaggccggcaagggcaaggcggctggcggcggtgacgatgactttgggagctcggacgaggaggacgttgacgaggacaagtatgccgacgcggccgacgcggccggccagaaggtcgacacaaagagccggatcaccgtccgtaacctgcgtatccgcgaggatacggcaaagtacctgatgaacctcgtgcgtcgagtgctacgctgccaccgcgaggtcgggctgctgacttgtcacctcacatcgcgcaggatgccgactcggcgcactacgacccgaaaacgcgtagtatgcgcgaggcacccgtccagggggctcggccggaagacgtgtgtctttcctcgcatcctgtctgccgaccgcaaggccggctgctgacgacgtcctccgccccctctcctcgtagatgcaattcgccggcgacaactttctccgctactcgggcgacgcccacaatatccagcagctccagatgtttgcttggaattcggcggcccggggcaacgacgtccacatgaacgccaacccgacgcagggctcgatcctccacaagcagttccttgaaaaaaaggagacgctccgcgacacgagcaaggtcggcatcctcgaaaagtatggcggcgccgagcacctaggcggtctgccaaaagagctgctgaccggccagacggaagagtgtacgtgcccgtccgacttggctatgcttgcgcgcgcgctgtgctgactgacacctgacttccatcggctgtgcagacgtcgagtattcacgagccggaaatgtcatcaagggcaaagagcgggcgatcccgcggtcgaagtacgaggaggacgtccacccaggtaaccacacggccgtctggggctcgtggtactcgctcacgacgggcacctggggctttgcctgctgccacaacacgcttcacggctcgtactgcacgggcgaaacgggcaagcggctcgcggccgacatgacggtcgacaagctgctcgctcagagcgatccggcccgcgatgcgccgccgccgcctgcggccgaggacgacggccggcggtccgtctcgcctccgccggcagagaaggccaaaggcgacaagagcgagtcgcgcaagtttgagaaaaagcggctgggtgagggcaaggtcgagctcgacaaggccaagcttgagcgggcgttggctgaggagaagaagcgcaagcaggaggaggaggaggagcagacgggcggcggcttccggccgggtaagaagagccgctacaacaatgcggccgacgccggcgggtcggacgaggtgaccgaggagcagctcgaggcctaccggctcgcaaagtctcacgacgccgacgacccgatggccaagctcaaggacgacgagctcctgcccatgtgagggcgaggcgcccgtcccgtatctcatcactcgcatcgtccagacccatacgcacaccttgtaacctgctgcctgtaacatgaattgctctcgtcgtcctgtgatcctcatggtagaacagggcccgctgtcgcgatcaatgtagcagcgcgcgcgtatctcggcacgcctgcaggtggagggcgtctcgtcgtcgtcggtctcctccgtgtccccgcgcggcggcggcctcttttcccccttctgccatcaccccccgctgctcaaccactctcttcctcaacaaccctttcagcatgtcgtctaccttcgaaaacaaagaggtcgtccacctcaagatgggcaaggtacgtttgtcgtccctgtgggaaagagcgcgaggtcgggggagaaggggtcgctgatgggcgcgccgagcgccatcgcaacaagctctccgactgactgctgcttccaccaccagatggtttacgccaatcttggcaactcgggtctgaaggtgtccaaattctcgtacggcggctggttggttgctggcggcaccgtccatggttattcataacaatcccgctcgtcctccataagatgccctgctgattcccttgctcgccttcggcgaactgcaggcgaccccaacgtcgagcttcttaaggtcgctctcgagaacggcatcaacttctttgagtgagacctcttcctttgtctgtcgtctagctcatactgaagtgccctttcttcacgtctcctagcaacgccgagacctacgcagccggtaagtcggaggaggagtggggtcgggccttcaagacgctcggcacccctcgcgaggaggtcgtcatctcgaccaaggtacgtctagccccgctgcatgggatcagaggctctccacagctgactccgccttgacgcgctcgtctccctttcagatcttctttggaagcaaggccgacaagcggacgatcaacgagtggggctgcagccgcatgcacatcattgagggtgcgactgcttcgatcatttttagctgtcaccagggttcgccagagctgactctaggcgccgtcgattgtcttccgcaggcctccgggcctcgctgaagcggctccagctcgagtacgtcgacatcgtcatggcccaccgtcctgacgtcgcgaccccgatcgaggagacggtccgcgccttcaactggtgcattgaccagggcctcgccttctactggtgcgtcgttgactcctgcggcctctgagctggcttgatgctgactttgcatcgacgtccgtctctaggggcacgtccgagtggacggctgagcagatcacggaggcgatcaacatcgccgaccggctcaacatggtccggcccatctgcgaccaggtaagtcgcgtcatcatcagctctcccgctgtctggcttctcatgcgaagtctaacgtctggcaacctcgccaggcccatttctcgctccttcacccgggcaaggtcaacggcgagtaccagggcctcttcaagaagtacggctacggcaccaccatctggagcccgctcgagtcgggccagctcactggaaagtacgtcgacggcgttcccaagggctcgcgctacgacaccaacccggagttcttcaaggagaccgtcgctaagctcaactcgtgcgtcttttgtctgtgcggcgtgggttcgcttgcatctctgctgaccgacaacacccttttgccaacctgcaggcccgagggcaaggcgacgaccgagaaggtcaagaagctgatggcgctcgccaaggagattggcacgacctccaccctcgttgccctcgcttggacgtaagtcgatcggttggctctcctccgccagataggcagcatgtcgtgctgaacaggtctgctttctgcagcatcaagcaccccaacgtctcgacggcgatcctcggcgcgacgacgcccgagcagctcgtcgagaacctcggcgcgctcgacatccttggtgcgtcggcgactgctctagcactgctttagacccagctaacctgcctcctcgttcgtttcgtctcgacagacaagctcacgcccgagatcatggagaagctcgaggacatcttcgacaacaagcctgcgaccgaggtcacctacggccgtgcttgatgcctgtagcctagctcttcctcgctttcgctctggcccttccggcctgactgtatctcagatgattttttgacaccgcctgaagctccgagcacgcacgaacgagagcagctggcatcctcatcggtccagactcatgacttgaacgtcttgagcgggtcgcgcttcttcgctcctccgcccggtccgccgagcgagcgccggccgctgcctcctcctccgcggcctccccgcccccgtccccgaccgcgaccgggcttattgaagggaacgagcgggtcggcgccctgtctcggctcgctcgcaccctctggcacacccgacgccgccgcgctggccgacacggccgagccggcaagggtcgagatccggggcatgaggtagccagggacgtgcttcatgtgagactggacgcgcgtcgggtgaagcgggccgtcgtgccggaggaagtttaggtcgttcgggttgagcgcaaagtgggcctgagcagatgaaggaggatcagcgtctgtgagggcgcagccattgtcgaatccacaagcagcgcacgcaccttaagcttctccgagttaaggagctcgcgccggacctcctcccgccgggcctcctggatgcccttcttggtgacactccggagtgcgtcctccatccggtagcggaagccctcgacttcggccttgcggcctccccagtcccactccttgacatcgccggccgtctctgacttgatgcgctcgaagatctgctcgtcgcgtttcgcgctcggcaggctgagcaccttgtccgtcccccactcggccgcagggacgacaaacgagatggcgaggcccgactgatgggcgcgcgccgtccggccgacgcggtgcgtgtacgcccgcgtcgtcgtcggcaggtcaaagttgaggacgcacgcgaccgagacaaagtcgacgccgcgcgagacgcccgactcgcggtcctgcttggcgccggcgttcttgcgcgcccgcttggacggcttggacgacgaagcctcggcctcggccgtcggagggggcgagagttgccgcttggacgaagacggctcagatggcaggggggtcgagtcgtgtgccgtcgagaggactgcagaggcgaacattcagaggtggcgtcagcatggttgcttaggcatgtccaagaaaatacagcgactgacactgcggggtctcgtcggcgatctcctcggtcacctcggcgccgccctcctgctcctcctgagcctcctcttcgtcctcctcgtcggccccgtcggcggcgccaccctcgtcagtcgcgatgatgtagtcgtagacgcccttgttgaactcctggacgatgtggtagcgcgagttgagcgggagctcagaattgaggacacaagccttgacgccaaactgctcgaggaagagcttgagccggtacgaccggtcgacgtcggcgacaaagatgaggcacttgccccggacaagcttgagcttgaggaggacataggcgagcaggaacttgtccttctcggacgtccggacgtagtactgcgtcaagtttgaggcagcggccgccggatcctcctcgagccggaggatggccgggttgcgcagcaccatgcctttgaggagctcaacgtccttcgtcatggtcgcactcatcaggaacgactgatagaccttgggcaggaagccgcccgagaagatctgggcaatgtcggacgagtggccgtacgagaggatgaggtcggcctcgtcaatcgtgagcgtctcgagcgcgcctagggcgagcgtcttggcctgaaggagggcgagcgcgcgcgacggcgttgagacgatgacgtctggccggtcagagagaaggatcctaggaaggattaaatggctgaggtcagcagcgggacctgccgttcagaaacgaggaagaacgaaccgctggagctgagcgctcgcaccgccggcgacattggcgacgaggacctccttgtcgcagtaggtgacgagacccttaagcgtccgcgtgacctgctcggcgagctcacgagtcgggacgaggatgagcgcccgcgtctgctgccggtctgggtccgagagctcgagcgactgtgcaagagttgtcggtcacgcaggggtcagcgacagccagaggaggaactgcgggcaggcacaggtcggatgcggaagcaggggctacgcacgctcttgacgctgaggaccttctggacgacaggaatgcagtaggcacccgtcttgccgctaccagtccgggccttggcgagaatatccttgccggcgagcgcgagcgggatcgccttggcctggacgagggtcgggtggaggaacttgaagtcggcgagcgcgcgcaggacgcgggcgtcgagcaggtgggcgaggtcggcaaacgtcgtcggcgcgagcaggtccgacatggctggtaggcaaaggtgatgtgcgacgagcctggcgtgggatgtcctgtgtagctcctatgggtcgatgctgtcgtcgtcttgagcccttcagccctggccttggcctgctcgcctgctcgctggccgcctgcgccctgacagtttcggcggttggccccagagtgcagatgcaagtcgctccgacgcccctgctcgcgacgcgtcgcccggccgtcggaccagctcgacctcatttaaacacccttgtcgtgtcgagcaacggccagcgcaggacaaggcagcccttcgagtatgccgtcgcccgccagctcatcctctctgctagcctcaagctccagctcgcgctcgtcgttggccaacccgtttgccgccgcgcgcacgacgacgcgtctcgtcgatctgtcgccaggtcgctcaacgcagcacgcagcgagcggctcaaagccaaccgccgtcgccggcgtcaagcgtgccaatccgtttgaccagccagacagtagcaagacgcctgcagcgtctgcgacgggcaaagttcgcgagcagagcacgttgtgaggctgccttctcttgacctcctgttcctcccgatggccagcctgcgcagtactgacgcgaggcgccgacctcatcctctcgaccatcagcttgcgatatgtcggatccagcgggcagcgtcggtcggcctcgccggacaagcccaacggttcgagctcgggctcgtcatcggcgccgggcggcgcctcgcacaagcagctcctccgcgacctcgtctcatcaaaggagaacagcttgacgacccgttccttagcggccgcgccgatcgatatcgtcgtcacggcgacaactggccatcaggtcgccaactacggcccgggccggaaccgcgtcgacaattactttgccgaacgcaaccggaagctcaaggggcaggcggcggccaaggtcgacgacatcttccggggagtcaccgtctggtttgatgggctcgtttcggacggctctgggccgggcgcgctgagcgacctcgagctcaagcggctcgtcaatctccacggcggcgccgtcgcgtgcgtcgctcgcacctcctcaagatcattgcagacgaggctgacttcaaacacccttacttctcgtccttacccagcaatgcgccgggccagcgtgtgacgcacatcgtctgtgcgaccgcattgacggccaagaagacggccgccctcctcggcaagacgcgcggctggcggccggccgtcgttcgaccgggctgggtaaccgagagcgtccggctcggcaagcgggccgccgtcggctcgtggtcgatccttcaggcgagcgaggtccgtcctctttctgcggcgcgaccgtctaaatatgcgcatcgacttcgaatgctgactggctcttgacgccttacctcgcgccagggccaatctacgctcgcaacgattttcggtcgtccggcatcgtttgcgttgtccaaaccctcaacctcgtctgcaaccgcaacctcgtcggtctctgctcgagcaacagcgctgccagcgccctcccagcctccagcttctgcgtccgccagcaggccaaaaaagaccaccacgtcgccgccggtcgttctcatcctcgacagcgatgacgaggacgcctgacgcaccaaagccactctgcgattatttagtcctcccgctgccctctcacgccttttcttgtcacgacctcctaaacgaccctcagccccctcacgatcccctccctgccatgaccattgacatcgacatccgcagtccgagtcgttattgagggcgactctgatattgcggccggacggcgatcctccggcggccggcatcttgcgagcacaaacgctgcgacactcgtcgccttccttcgactccctgtcttgaaagacggcttttcctcttgcattcattctgctcctcggctactctcgtgtcggcgacaccgtgccccggggaaacatgaagtagaaggactgaagctttgaacctaatgaagctctttcgatcggctccgaacgaacacgcggcgcttcggcgtcggcgaggcgagccaagagaaaccggttcgaggcttctcgctcctctctccccatcgacggccacccttccctcttgtcctcttctcccctcgccggtcctcaacgatgccatctctccgggctcagaatgactaccagtttgtcctcttcaggcacctgtcaggagcgagccgaatgagtttccgccgctgacgcaccgacctctatgctcctccacctcccttcgctctcgaccgaccctgcctcctgccagactctacgggtgcggcgtttcttcgttgcattccttctgcttcctttctctaaacctgccaaagacctcctctataggtacatcccgaccgagtgggtctgcatcgttttccttgtcttcttcggcctcagcacgggtgcgtgctgcctccgtccgaccgctcggagagcgtcgagcgcaggctccttccgttctggccaaagctgattcgctgaccgttcgttcactcttcgggacgtagccgtacatctcgcccaggtgcgtcgagctctcgctggtcctgggcatgctgcagctggcttgtcggcctgcagccaggctcgacagtcacctcgcgtccggctcggagctgatcgaccgcacctccctcgttggcaccctgccaggccatctggtacaagctcccctggctgctcatcacgatcgtcgtcgctggcttcctcgagatcctcggctgggccggccggctttggaacagcatctcgccgcgcatcctcgatgcttagtgagctccgactttgccctgtcgatcacagacccggccggaagctgactttaagaccgaccgtctcctagcctgatgcagatctgctgcctcatcctcggccctgccttcttcatggcggccatgtacctcgtgcgtttctcgcggcgcctgacgtccaacccgtcgtcctgaccttcgacactgtcctcgctccgccagaccctcggccttgtcatcaaccggcttggcccacagtacagcaggatctcgcctcggtggtacactatcattttctgcacgggcgacctcatcagtctaatcgtccaggccgtcggaggagcgatggccgcgctcgccgtccagtcgcgccggatcccgccgcccgaccccaactttggcgccaaggtcatggtgcgtcagatgggcgtcgtatcaagccagagatggctgttgactgacaggctctcgtctgacggttacgtaggtcggcggtatcgttttccaggtgaggatggtcttgccgcgcgatccacgtctcacttgctgatcagccgtcgtgccttgtcgtagatggccgttatggttgctgtcagtgctttcctaatctccattcatcggcctgctctctctgctgatcatcaccccactctttttacagttcaccgccctcggcgccgagttcatcgtccgctgggcagcccggcgtccgtttgcccggcgcgccgccgctctcgagcagaaccccccttttgcgttcggagagggcgagaagctcgacgggacgacgcctcacctggccggcgaggaacggtcggagcaccggcggtggaagctcctgctcgtcggcgtcgcgcttgcgaccctgcttgtcttcatccgggtaagtctcatgcgcgctcctttcttcccaatgagccgaagctgatccaggatgatggagtggactctacagagcgtctaccggacgatcgtgcgtccgatttcactgggcagcttcaagtcttttgtctgtgctgaccgatcgctcaaccgctcacctcttcaggagcttctcgacggctggaccggcaccatcatccgcgagcagccgcttttcaacctgctcgacggcatgatgatcgtcctggccctcatcacgatcaactttatccacccgggcccgctcctcgtacgtcgctgtcctgactgtcgaccgttggtttgcgatagcccgcaaagcccgactgacgcctccataccttcagaacacgcgcaaccggagcatatcactcggcatgaagcgcaagcgcaaggccaagcgtggcgcctttgcggacgactcgtcgccagcgacgctttgagcgagtgctccgtccctgagccctatagcggcgcttgctctcgtctctccgacccgataccctcgttcctgctgcgatttcattcaccccatccataccgtctgctcttctctcgacccatcgcgatctctttcccgggctttccttgccgatataacgatcttttgacgttgtgctcccgagtgcgccgcaggacgggtatcgcgaagaatcgcgtccacctcgttcgacgtgcgagccttcgtgaccggcaggcgcacctcgttgtcgcccgctagtccttcagccgggcaggaccatgtacccagccttggtgcggggcattccagagtactcatcgtgagagttcggggtcccgcatccgcgccgagcagtagcagcagcaccttccggccctgtcgacctgccgtcctgacctcgacctcccactcgctgctgcctcaccgctgcccaaggaagaggctcctcagatcgcacgctctcctttggtcctctccaattctgtcggtccagtcaccaccagaacagcggtgtgaatccgccctcgccgctcgccgctcgccgctcggcccgccatgtctgcggctacgctcctcgtcggcaacgtctcgctccctcacgttttcggctggggctatgaggactcggccctcgttggctggatctgctttggcttccgcttccaggctctgctcatctcggctcccatcgccggcctcatcctcctcgtacgtccagagcagcaagaggccgctcggggccgctgcggcgcctcttgcccgacagctgcggttgctcccatcgctgcctcatcttctgtcgcccggcagcttcagcaggatgctgatcttgacccctctttacgtcgatcaggacctcgtcgcctacatcctgacccggacgctacacattgtgcgtcctcgaactctcgaactcgcgccggacgaggcggcttggcggcaacgggcccgagttcgcccggccaggccgtcgtcttccggacgacctagagcaaggccgcatggagaaaggctgacaggcatgtgtctgcgtcggatcgaatccctgacagtctgcccggcgagtccgggtccgagcggcagcgtcgccgctggccgccatgatcgccctcccgccgtcgccgcccttgcttccgagcgagctcggaacggccgagacgatcaagctcgagcccctgtcggctacggtcacgacaaaggagccggccgtcgtcctcggtgcacccatcgtcaacgttgtcatcgcaactgaagccctctcgcttaccagcgccccttctgtcaacccgtcgccgacatcctcttcctcgacgacatcgacgagctcgtctgccgagtggacgcacgttcgggccgaaccttcggcgccgcccaaccttgtctcttacggctcagctttcagcggcgtctcgtcaaggagcagcagctcgtctgtctcgagcgcgtcgggttcgcccgtcctgactccactcggcctcggcttgagcggtacggaccagccactgctgtcgtcggtcgccgttgacccggcctcagcgatggtgtcggacaccaacaccggaggctcaagccgtacgcatcgccggaccctgagctcgctcggtgtgtcgccctctgcgttcctgcgccaagatgtcagctctgacggacgcgctcggtcccccctttgcagccttctcgtccatccctgagcacggccccgagacgaccgatgatgacgatgacgatggaggacgcctgacgccgacctcgtccgcctcctcgcccggtccctctcggatgacgacgcccggcctccgccacagagccctaccgccgctcttcccgctctccggcctcgccccagcatccggggccaccgagggcgtcgacgggcttgaactggccgccgccgctgccagaacaaagcactctcgcgctcgggccgcaagtatcggtgttgaaggtccgctcgggttcgatgtcgacgaggaggaagaggacgagagcgacgtcggcctcgctgaagatgaccggcggatcgacagctcagacatcgtcgccggcgacttttcctcgccgcgggcagacgttgactcggccggccttcggcggcggacgacgctccgtacctgagcggtcctcgatacgcagcctacgtcgccagccttgtgccgcaatcctcactaccgtccttcaagcccgcccgcacacggctctcgttcgcgaccggcccatcatgcccctcgttcctcacctcatcctagatgtcctcctcctttaaacaaacgacccttgacgacccagcgcttccttgtccttcctgtcttcaacgacctccccgaacactctctccttttcactgttgatttttctcttctgtcagacttccaccgcccgcccatccttcagccttgacgtcccgttcccgcgcttcatccttcttgtagatctctcggcgcttcaacccgcgagtcaaagccctcatgccaatcgcgaccgccgctgcgtctcgtcccctcataccgtcactctcgaccaatacacgtccgttcctgttctccgaccccttcaaagctccgagtgtgccccggaagcggtcggcggcgtatcgtcgctgccggtgcgcaaggcggcggccgtcttctcctcttgaccgagggtcatgacactgagcaggtcaaagactggtgggaagagaagaggggacggggtcagaggtggcgaacttgagaacagccgcgagtcaagcctcactgatgtcggccgcggcgatgcccgttaagtcggcgttcgtatcgtatgctgccgagacaaggacgtcagtacgatccctacatggcgcagccacgcaggcgtcgaggctcaccgggagaaacttcgacaacgtcggcgccgacaatgttgagccctttgaggccgtggatgatctgacggagctcgcgcgtcgtccagcctgaaaagaccaggggtcagcgtcaagacgatgaggtcaggctcttacagtgtcacgcacctccagactcaggcgtgccggctggcgagaaagcgaaacatttgttagtcaaccagtactccacgatgccaaccttcttctcaaccaggcagactaactgccaggagccatgctgaagggtttcgcggctcggtcgtcagcgcaactttggcaggagacacagtttgagcaggagcgcacctggggtccagaatgtcgatgtcgaccctgattgcgcgaggtgagaaccggccagcgtgagtaaagcgttcgagaggaaaggagtgagacgacgaacgagacgtagaccggtcgctgctcgtcaaccgagccgaagcgctcgcggatctgcttgatgacgccagcgactccgatggcagggtcgtcgaccgcccaaccgtggataagctggaatcctgcggtgatgtcgtcctccaggtcctccgggccctggaatattgttgcggagaagatgagcgagcggcagctcctgggatgatggcaacgctttgactgaccgatagacgagtgcgcacgccggcgtggatcgagccctttggccgcagcaggccttcttcatacgccttccagaactgcaaggaggaacaagttgacgagcttcagccaagtgctgtgagatacagagctcaagagcgactgacgaaagtcccgtggttgatctgcgattgcggggtgctcactccattgtaccctctgggattccatgtgtctatgaggcgtgctggtaagcggaggtgaagtgcttggcgagacgacactcaactcaccaatatgagcgtcaaagtgactggtcggagcagttcgattcagctcgcctcgtacaagaagagcatgcagcgccgaggaaagacgcacatgaccgagatcggtccccagaccgagtgcagcgaccgcaggatcgggaggacgatcgtgtgatcgcctccgagcgagacgagtcgcgggtgtgccttgccggtcgtcggactgatttgagggaagaaggagctgcccttggccgaaggaacggtgtgatgcaggagcgaggtgtctgcgcaagggcgagcaaagcgcaagagtcagcatcccgccttttgagcaaggagaagagagtggggcgaacaagcggcctgtaccatggagatggcaagtgccgggtcgtagggtgtgacagggacatcttggcagtccacctgcaggaagagagccggtcagggcaggctcagtcgacgacttctcggaggcgcagcacccggcgacgcacgatctttgccccgctctggtaagggttcgtctcgaggaccatgttgtagccgcgaacggggagctgtcggcgcgatcctcctcggatggcatagggaccgaagcgagcgcctggacaggaggaggtcgagggcagggcgtcaggtcaagagagagctcggctctcgacctgcagacgacgcacctggccgatagctgacggccgagtcaaatgggattccaatcaaggcgatgtcataggtcgcgtccggctcatcgaggcatttggggctcggtaggtgggcaaacgacgtcgcgcccgagaaggaaaggtcgccgacctggccaaactcgtcggcccaggggttgggctgcgggctgccgtcggtcgcggtcgaggcggcgccggctgacgaggcagaatgatgaccgccgcgatgcgcgtgggcgaccgagagaagcgctagcagaggcaggatccgggcgaccatggggcaggacgtctaggagaggaggtgatggtccaggggtggggataggaccagatgagagtctgccctttgacggggcgaaggtcggcctcctccggcgttgctccgcagccggcccgcctgaaccgaccgccatctacgacgcgccagaccctcctcaaacgccttcgatcactcccggttgaacactggtcgactatggctgcttctccagacctgccggtacgtcgcttgccgcttggggaggctgaatgcccaacttccgctgctctaaagcgcccagacgcgctgacgtccgcgtcgcttgcctgccgccctgccctcaggtgtccaaggcattcctctcgacccggacgtccattgcctggctgcccgacccaccgtcagagccaaccgagacgctcgtcctgaccggctcaacgtggtacattgaccttcgagtgtcaaaggaagccggaaggccgttatactgggggatggcaggggtgaaggagatcgtcggggggtcgaagggtaggtccggctggcttgcctcgtcgactggacgatgcctgacgtagctcgaccccatcgcatcgcagacaagccaagagcgcgcttcacgaaccacctcgactcgcagcagccggagctcgacctggcgggcggcggcggcggctcagccgaggacgcgccgctgccggacgagggcaacttcgtcctcctcccgaccggtcagacgctcgagagcgggtcgatgctcaacccagcgacgggtcgcgttcagccgtacgaggaggtctggtcgggcgtcgacgtgctgcccggcgagcccgttctcatcctcgtccgacgctcgccctccgtgacgaccgatggccgcccgacggccttcctcggcatcatcggtcgctatgcgctcgcgctttggcaagactcctgttcgcgcttgttcggcgcatggaaggctgagcgtgcggcggccgacggggtgacttggacagagacgtggtcgcagcagagcagtgacgcgcaggccgccggagtcgctatgccggagggcgatgcctggcaagcagctcttggtccggacgagaccggctcatggaagcgcgagggagattgcatctcctgggcaggcgacgagtgggagatcctcgagaggaggacgatgggccggggtcgggcagagtcggcctgattcggattcatcatgaatggaatcacagttagagcggagttgacttcgaatgccgacgattgacttcgcgagaaagggaaggacgctccgtgagctctgtcgcctcatccgcgaacgacgagcagctacgacccgtcgcccggcctacacctcccgctggctcgaagacaaagcaacagtcgcgctcctcagcaacctcctggccggtccaccgttgccgcacgggctgacgcgaagccttcgatgctgctcttgtcgacggccgcctccctccgggcccggcggctctcgccgacgaccgctcgagagctgcccggcctcatcgtcctccggtctctgcacctctcggccgttcggcggctgccgcccaagctcggctcgctcgtgccgcccaactcggacatctctaagatccgcaacatcggcatctttgcgcacattgactcgggcaagacgacgctcaccgagagcgtcctcgcacactctggctagtgagtcttcccacgagacctccgatcgaccccgagcacgcatcatgcccctcgccgtggtcgtctgagctactcaggcgccttcagcacccgaactcgatcctctgctgccgtctgctcttgaatcggagctgatccactctcactcggcgttacgcagcatcccggccccgggcacggttgacactggcacgacctcgaccgacttcctgcctgccgagcgggctcgcggcatcacgatccagtcggcttccatcccggtccagtggcagggccacactgtcaacgtcgtcgacacgcctggccacgtcgactttacgatggaggtcgagcgtgcggcgcgggtcgtcgacggcgctgtcgtcgtcatggacggtgtcgagggcgtcgagggccagaccgagggcgtttggaagcagctcacgcgctacaatgtccggccacggatcctcttcgtcaacaagctcgaccggccgggcgcgagtctgccgcactcgatcctctcgacgagcaaccggctgcacccgttgccgctcctcctgacgctgccgatcacgtcgtttgactcggccaacggcaagggcggcgagccgggcatcgtcggcctcgtcgacatcatcggcggccgggtctggcgctgggaaggctcgcgcggcgccgaagtgcgctccgagacgcgcgtctttgacgagttcactgcagaaggcgagacgtttgcgttcgattcgccgccgcccagtgcaacgccggcacttgtcctgcctctagaccacccgatccgccaagaggctatcaacgcccggacagcgctgatcgagacactctcgacccaccaccttccgctgctcgaagagttcttcgcgatcgaaccggcgtccgacatcccggcccacctgctcgtcccgccttcctcgatcagggcggcaatccgtgcgctcaccaaggacggacttgccctcccagtcatctgcggctcggccttcaagggtatgggcaccgagctcgtcctcgatgccatcatcgactacctgccggggccgggcgaggttgggcccgctctcgtcgtcggtggacctgacccggagccgctggctccaaccggcaagggcggacggaagaaagctgcgcccggctggaagggcaagaccaaaggcaacaagtcgcaggtcgccgccgccgaggtcgagaaggccctgccggtcctcgtcgaggacaagcgctgcgtcgcgcttgcctttaaggtcgtttgggacgaccagcgcggctggatgacattcgtccgggtctactctggtgcgtgcgcctgagtgctcccttcacagtcactcaataagagctgacctgctcatgcggctgacctgtaggctccctgacgaaggagatgctgttcaactcatcgatccaggagctcgagcggccctcaaagctgctgcttctctacgccaatcagccgatcgaggtcaacttgctaccgaccggatccatcggcgtcttgcttgggctcaaacacacccggaccggtgacacgctcctctccaataccgacagccgtcgcttgatacccggtccaactcggttgcggggcgtcgagattccgagcgccgtctgctcggtagcgatcaagtatacaggcaaggaggaggagaaggtcgtcggcgaggcgcttgagcgactcgtccgacaggacccgagtttgcggctggagaacccaaccgaggaggagcttgagaacaaccctgacgctcagacgctcctgcatggcatgggtccgctccacctcgagatctcgctcaatcggctcgaggaagagcagaacgtccgcgctcgaagcggtcgcgtcaaggtcagcatgaaggagagcatctcgctcggcagcccagcgatcgacatcgccgagacgtggtcgggcacggtcgtcggtaacccggcaacggtcgaggcttcggtcaacctgaaaatccagcgcctgtcggacgccgagctcgcagttctccgggcggagggcgagggcgacagcatagccgagtgggctggcaactcggtcgtcatcgacgtcgacgaagacgacccactcgtcgcgctcgttccgacgatctccgcgagcctcttttcgagcatcagccagggcgggccgctgatgggtcttccgctgtcgcacctgcggatccacctcacgcccgtctcgcccttcgaggatccggcactagcgcccgcggtcgccgccgcctcttctacggcgcaagacaagggcaagcggcaaaagtcggccgcctccccgaccgcgtcttctgctggcgcatccgcctcacttttggctgcactccctccaccagcagctttcgcgcgcgccatcgctgcggcgatgaagaaggcgctcaagcagggcgggccgacgatcctcgagccgctggtccacaaccgcatctcgggcgtcgacccgtcagacctcggccgggtcgttgccgacctcgtctcgcgcggcggcaatattggcgagcttggcgaggagacccaggcctcgcttggctcgggcgggtcagcgtcgtccggggaggacggcgaaaagccgtacatgccgccggcgtggatgtcgccatcggcctcgacgtttctcctcgccgacagcgcctcggccgatcgcgtccagaagcggaccatcagcgcgacgatgccgctcgccgagctcggcgattatgccggcaagctccgcagcttgagcggcggcggcgggacgtttgagaccagcgatgccggctggggcgacgtcgacgtcggcaccgttcggaagagggaggaggccttcctcggactagattgatagcgacaccacccgtcagtcttgtgggagcagcgaaaagtgcgtgagggtcatgagagaacgggacggtgggtgacgacggaagtaggggcaaggctggtcttagagaccagtcggcgcctcagactgggcgcggccccattgcgaggcgccgaccttccacaggagccagaggccgacgatgatagcgaccgtgtaaagcgtcactcggtgctgcttcagaccagacgagttggcaaaggtccgggcctggtttgacgtcgtccgcgcgaacgacgtgccgaaggcagagaacgagtttgactggggcgtaggagagtgtcgtcagccaaataaaattctccatcatctcatggggcaggcctggggcttactgtgtcgtccagttgcgtgttctgccgctcagcgtcagagtagatgtcggtcgtcacctgcgcgcgggatgcaggtcgggtaagcgtcatgcccttgagacctgagctgggatcacgccacagaagcgccctggtaagctgcaagacgcagttcgcggcctgttgctcggctcgcgacattcggagaggaacgcaggctgagcagctctggaggaacgtacccctcgcagggcccggatcttgccgtgcaggtcgtcgagctgctcgtcgttctgctgctcgtagacctggtccgaggaagttctgcagtcgacagtcgcctgtcagcatcctagagctgtcggatcatcgccctgggaagacggaccctgctcgaggaggcatgatggctcgcccggtcgtaagagaggtcggtggtgctgcggggtgcggtcgcgctgcgacctgggatgtcgctgtggatagggtgaagttgagccggacgaccttgctggtggaaaagctgctctgctgggctgtctggcgggtctgctgctggaggcctggcgtgactagggcggtgatgaggagatgctgttggaggtcaagtcaggcgggcgggatgagatccgacagctgcgagcgacgagccgaacccgcaacggccattattgctctcgccttacagcgaccccccatcccttctaaacttacattcagggcagcacatcaagcatggcggacaagcagggagcttacggcaagcaggaggtgcgttagaccagtcggctgtcgctctggcggagctgctgacctcaaaggcaccgcgctgacgaccgaccttccgcctccgtccttcgccgcctgcaccagagcgcatccgagcggtcagacagcaagtgggacatggctgtcttcaaggagcgggccaaggagaaggaccatgcgcgctatgagaaggcaaaggagcacgaagaggcggctaagacgggtgcggcctctcgctcctcctcccacacccacatccggccggctgcgagcgcagctgcacgacggctgcagccctcctcgtcgccctgtactctccagaccgctcactgactctctgcccgcttgtgtatcacccgcaacctgcaggcaagaaggtccggcgccggctcgacctgcccaagccgacacaggcggcgaccatgcgcgaggagcccctgaacctcgacgccaacctcaacaagacgatggtcgtcggcaacacgaccggccggggtccgggccagccaggcttctacgtgcgttgcttgcggtccgcgaagaagtcgtccggctctgcgtgctgacgacctcttgccctccgctcgacagtgcgacctctgccggcgggtgtcgaaggactcaatagcctacttgagccacctcaacagtcgatcgcgtgagctctcggtcctacacttcgcagtcgaagactgggagctgatcccgccctcgtcattcagatctgaggcgactcggccagacaacgcaggctgcccgttcgacgctcgatcaggtccgggccaagattgcctcgctccgcgcagcgacggcgcaggcgtcggcgtccaaggcctacgactttgacgcccgactgcgcgaggtcgcccgggtcgaggaggcccggcgggccgaggagaagcagcgccgggtcgccaagcgggccgaaaagcgcgaggagcgtgagcaggcccgcaagggcgagcaggtcggcggcgagctcgcagagatgatgggcttcggcggcttcggctcgagtaagaagtaggcctcccacgtgcggccggcagcctagcgagacgtgagcgttcttcttacgtttcattgatgacctttacgaccccctgctgtcctcgtcctcacgcgtgcggggggttggagcgctggcaggcatacatcaaccgccgggatcccctctgttttcttgcttaatgctgtcagactagccctcgccctcgccctcctccatcttctcgcggaaccaggccggaatctcacgcacgccgctgacaatctcgacggcctcggtgacggcgccggcaaagccgatcgccgggtcctggaggtcgggctcgccctgccagaacaagcggccgtggatctgcggaggatgagggctcagtcaggacgcagccccgatcagtgagcagtcgttactggtcgaggacgaacgaagagaaaggcgtttgggatgaagggcacggcgacctgcaaaagtcgagacgagacagtcagtgccgcagattgaagactaggtgctgcagaccgctcgacgcaccctacgaaagacgtcttctgtcacgcgcccgtcaggatcctcccagatggtgaacggtaacggatcgacgagctcagtctcgccgtccgtttcgtcggtccctcctcttgcttccgctggcctctctgcccaagcgtcggcaaagatgcgacgaagatacttccactctaggtggcgcgcctcggtttcctgggcgggcgtgaccggcggcgcacgcgggttgggcgcaaagacgtgagggttgttgaccgagacgactttgaggaggggcgcgtacgtcctttgaaggagcgagagggccggaaaggcggcgacgcaaccctcacacctgcaaaggaggaagttccctcgtcagaacggcatgaggatggagcagcaaagagaaggggaccgaccatgatgcccagaattcgatcaggatgactttgtcctttgcctcctcccaggcgtttcggccggcctgcggcgtgcagtagtcgactctgcctgaagactcgccggccctcctctggagccactgcgcatcagccgagtccataggcggatcaggtggcgaggcagatgatgacgcagacaacgacggaagccgccagccaagggcacgaagtgaggcgagcgggccggcgaggtcgaaacgttcgccgaggtgcgggcttctaaagcccggctgaacgtaatcaggcggcccggcctggacgagtgcagggatgaagaagcggcaggagagtaagcgctcccattcgcaatgagtgacggtcatctcggtcgtccggcccggcctcatggcgatcgccgagccgaccgagcccccgcgcgcacgcccaatgaggtgctttctgaatggcgcaacggacgcgcctggtacttttcgcgaaggagcgcgagcgttgttccattccgtcggaagaagccctcggtctcgagcgcggcctcgcctgtctcgcggtagaagccggcgagcgcctcctgcaggttgggacgcacgagtcagctcagtccctttcggccgcgcggccgcctcacgcgcagctgacgtcgttgagaagcctcgacgcagctggcgagcatgaggacgagcagagcagaggacgtacaacccagcgcgcctcgacccagcgctcgccatggtcctccttgagcgggttgagccagcgccgccagatgccgaggacggccttgtcgttggcgatctcttgctcgagcgccgcctgtgatgccgcccgagcccggcgctgggcggctggcgcgagcggcggcggaggcggcgaaggcgaccggctcgaacaggacgaggcgggcatctggtggatggttcggttgcgagtgagcgatgcggcaacgaggctgcaaccggttgcaaggggctgcgcgagctgcgggagtagtcaggcggcggatgccggattacgggttggcgtcagcaggctggcgcaacaagagggcagctcaagcagaggtcgttcacctggtgcgggcggacgatgggagccgttcgggccttttgcgagcgcaaagaggcgcaatgagcgagcgagccgagtaagataaggctgtagcagtgagcaagggtgtgatcgacgccgtgggtcgacgcgagcggacgagagctaggagaagctgaggggtggatggatgcaggtaagagtctcgtcgccgttgtcggtgccgaggaggcgccctcgtcgttgggcctggaggagcgagcggcgcaaagcggcgctgtctgtagtagagaaggagtgagtggaggtccagggtcggagacatgtcgagcgcaagggtcgtccagatgggcccggccgtcggccaaacacggccgaacgggtccttccttcagccaggggcgaggtcagttccgggacgagagcgtcgcacacaagtatgctgatcgatcagacagagagcgtcgtctgcctctttgtctgccagggtcgtagtccttggcgaatgtcgatcgtcgtcggagaagagcgtcggtcgcgtgtcgcacgcgcagcagccaacctgcatctcttctgtcgacgctcaacacagcccaaacaagcgtcaaagctgtcgaggcaacagggaagggaggacgggtcttcctgaactcgccaccctggttgtcggcgacacgctgaatggcccaaccgcgctcgcagtcggcccagccaggctctcagagactgcgggattcgacaagcagtcgtggagagatgaggggcgcatgagagaagtacaatcaaaggccagactgagaccaagagatggaggaggacagggtggtgaaaacaagggagacagcgtagggcgtgaagcgacaggcgaagaacggcgctcagtagacgtagacaaactattgtgcagagggcgactcttgtcaacaagggctcgagccatgaaaccggcaggacgggcaggcagacgtacctcctcgttcttccagtcactgatgtccttgtcctggttggtgagggggttgcggcccttctgcgactcgtggatggcctcgaggtcgacgttctcaaggtgctcgcccatgcgcttctccatcgagcggtcgatgatgacgcgaggcttgcccattgcctcgcgctggttggccttcttgcggttgagcgccatgaagccgaggaccaagagaccaatgaggccggcctgggcgatgaagaggcccatgacggctccgagtccgggccggtagcgaggagcgtcgacagccttgaacagtagaggaccgacgatgttgccgacgctcgctccgacgttatacatcgagaccatcgccgagcgcttggtgtgaccgccggagtttgcgacgacccagctgtcgaaagggggaggaaaaaggtcagctctcggcacggcagcgggccggcaaacctaactctaacgcacctgacaaggagcgggttggcggcgaaaaggaacgcgagtaaataatatgagatgaggttgccgacctgctggcccttggtgttccgaggcagcgtgtacaggaggaccgagccgatgacgcagggaatcgaaagggacgccagcgcgagtgactttttgctccactttaccgcaacggcgcaagcgacgacgatgactccaacctggagagcgccgaatggaaggttgaggctgggtcgttcgcagatcagcaggacgcgtcagctctctcatctgcgacccgtgacatacgcctcgggacgcacaggagtgtctggctaccgctgaaaccaagcgagcggatgatgatcgggccaaagacgttgctgtggggaggagcgggggggggggggcaggagggggtgagtgggggagatgcagagtcgtgtcgaggttgccaccttcgaaagaaaagtcgatatcggcgagagaaaagggccggtcggccgaggcggtgttgacgatatcggccatcttggccgtgtcggactgagggtcgctcatgccagttggcggtccatcgtcgcctgcgagctgactgtcgtcgggggcactcgaggctgacgatggtgccggctcgcctggcggaggaagctcgtagaggaccccctcctctgggacgggcgcgagcttgaggtcgtctagtggcgattcaggggtaggcgaagtgctaccaacgtccgctttcgtagaagggacattcgactgattgtctccggcgggtgtagagtcgtcctcggccgctgatgcgtcgtccgttgtgacagagtcttgtaccgggttgaggcgcgacaggtcaatcaggcggctggccgagagccgcgaggttcgcgggaggacgggctcgctttcggacgaactgaaccccttctgccgtagggtgttgaggatcgagagcgcttgagagccgaaagtgtcgtcggcagtttctgcgccgagatcgagcgagaggctcgatgggagggccgcgctcggctcgacgtcgcttccgcgctggccggcacgacggcggcgcggcgccattgcgcggagcgattccatgatgttctcgatcgcgggcgcctcgtcgtcctgtttggctttgcgggcagccttctctgcagcctgtcgctcggcagcctgggcagagggcggctgaagagtcagcctcgacttgcgcggacgagacgaggacaaaacacaggatgcgtacctccttgcggcgctgcttggcggcttccatctcggcccacgacaggttctgcttttggcattgctgagagaaggaagaggaggtcagcaagagcgatctgcgccaggatagtgcgcgcgtgcctcaccttgtaggaagtaaggaaggttttgaagatgccaaagaagacgttggacggagtcgtcgggtcctcattgaagtagcggagcgtctcgttgtaggtcgactcggtcatgatgcgtcggtcgttcagcgcgtcgatccggtcgcgagcgtcggcgatgaagcggatcatgcgctgcgcgtagcgatcgccggggatcggctcgtcggtcaggtggtccttgatctccttgtcgatggccgcgagcttttccgagagctccgctcgcgccttgccgacaggctggagctcgtctgtgggcgtcacgaccgaaggcgagaatgtctgtcaacggtcgcacttaacaaatcggaaagaggcacgggtacgtacgtcgagaaccttcggacgccttgtcgagctcatccatgaagccctccatgtcgtggaagaggcttgagacggttcgctcgacaaagtgcagcagattctgcccttgcggcgacttggtctcgacgagctacgaggaaaacgaaggccttgtcagctgccgacgtttcacacgctgcctgccaccgcaaccttcttggtttttcggactgaccttgttgatcgacgcaatcttgaagccgaacgcgccgccggcgtacgagttgccatttaggtagttgccgatcataaggatgagctagggggggggggatgagaagacacgtgcgtgttagcgagcgccatcgaacgaaggaggtcatggggctgtcggcgcaccgaaagcagttggcggaatttcggggcgtcttgcagagcctgtgacgcctcgtacgtctggtcgacggcctcttcgagcatcgcgatgcgctcctcaaagcgcgcgcggtagagcatgccctcgacgcgggcggcgagccgaggaatcttgatgagctggaccatgagccggtcggccgggtggagcagcatgagctcggccatcgtgtccgacttgtgcgcgttgagcttgccgacctgctctggattaggcaagaacttggaaaggttctcgagaaagttgtgcgagcagtacttttcgtcgcacgcgaggagcttcacccggagttcctcggggtcgtcgatcttgtagcccttcatgaagatttctgtgagggatgctctgtcagcgtgagggccgtccgcgagcgggttaaagaacgagagtaggtgactaaccgacgagcttcttgacctttgggtcgaggacactcatgagttcggcttgccgttccttgtctggagaaagcgacaagcatcgccgggtcagtcatcttggcttcgggcaaggagcgatcagtgagacagagacgcaccgacgatcttcttggcctccatcgacgagaaagtcgtctccatctggctccaaatgtcgaactgcttcatcttctcggcccactcgctctcgggcgcctcggccgtggtgacggcccagacgttgggcgagtcggtcgtaatctcgccaaccttgtcccaatgcagctgccggaccttggccgacgctttgtaggtaacgttcttgcgaggcgccttgacgatgctcgacggctcgaccggccggagaaacgcgccgaaattgagcatcggcttcttgccgtcatcgccagaatccggcgcggattttgacccaccgcgggctcccgcagccttgaggcccgagagaccgccggcgataccggcgaggaaggctgggcgcagaggagcggcggcctgatcatcggcggcctgcgaccgcttcgctgccgctccgccaatgtcggcaaggaaggagggtctcggtggttgcgattgcccgggagcatctttgggccccctctcgtcgtcggcgtctcgtcgcttcgaggcgatctgagccataagaccggcggcgaaagggtttggcggacgagccatcgccgtcggcgaatcgagcggcggcgcctcttcggccgtgagcggagccgcgtccaaggagaaggcctgctttacgtgtggcggccggtccgacccgtcggtgctgaggccgtcggcggcgctgtgcagagcggcagcgccggccggagagggcgagacaggagaatgcggccgatcgctctgcgctggccggagctcgcgcgattcgtcgagcgtcgacaagccaggatgcttggacgacccggccgtgatcgatgagaacgaggcgtctcggttgtgagggctctggaagctgtgcgagtgatgcgaagtcgcttgggttgagaaggtggtggaggtgaagccgctctcgcggcgactcgagctcgacgcctcactccgagcgtcatcgagatcttggccggtgacaggggccgatgcgcttcgcgaaaatcgccggcctttgagctcttcgacgaagcgaggagcaaggaagggcttggacggcgtcgttcctgagctgttgagcagcgggtggccgcctcgcccacgactaaattcgccgcgctgccgtgcgcttcgaggtccgttgttcggcgagtgctggaaagcgaaaccacagacggccaagtcagcacacaagtaggtgattcgatgagcgaaaggactgaagacacacggaagagctgaggccggcaacgatgctggcctcgatgtgctcgcgcacgatttcgtcctcggcgtcgacaaactgcgagcctgacttgacctcgctccggcgagcctttgactttgctggcggcttcggcgtcgtcgttgccggggagccagccgggagcggcttgagcgggacgttgacaacgtcggctgagtcggcgccgacagtgtcctcctcatcggtgtcgtcgtcaaagccggagcaaccgaccggaagacggccagaccgccggcgacgttgcttgcggtgcgcgccctcgagcttctcaattgtcttgcggatttcctcctggcgttcgaggctatcgaggagctgctggcggtcgaccgagccgtctgtgttggcgatgacgccaccgagctgtcggtcctccttgagcattgcgaagagctccatgatttttgcctcgaggatggcgatccgcttctcgtacgactcgcgcatctcgtccatgtcggcctgaagcttctgggtcgctaggcgagagcccttgaggagggcttcggtcgcgccgagcttctcggtcagctgagccgtctgaccggcgccgccgagcgcgagctgctcctcgagcgccgccttttgaagcgcgagctcctgggccgtcgccgtcatctcggccgcgcgggcgcgggcacggtcgagccgctcctgctcctcaaattggccgacgagttgattgacgttgctgccggtgagcgacgaaaagttgaagtcttccatgccgacagcatcgttggcgacaaggctcgagacgacccggttgaggatctggtgatagcgcagccggatctcgtcgtccggcttgatgagaaggagactcttgagcgagccgaggaagacgtcgcgggcttgcgtgccgtcgaccgaggcgagcactcctcgaaagacctcgagcgggtcctcgagtgatccgacgcgaggcacgtcgccgacgtcctcaagctcggccaagtcgctccggcgctcgtacagcatgtcgtcgatctggcgatcgatgtcgggccgcttaaagcccctaaggagggtgtagatatcttgcgcgccggcctcgtcgagctggttccggatcaggcagcgcacgcggatgtcttccgggtgaccttggagcgtccgcatcagcagcgacgagtccgaagcgtagtctgacaacgcagcgtctccggccgggcccatcgccgacgagccgaggttgcgcctgagctcgtcgctgaggccgacaaggctgcccatccggccgcggccgccgagcgtctcgcgcaggttgcggagccacgagccaaaggccgctccggacttgtccttgtaaaggcggttgaggtccgtcatggccgagatgaccttggcgtggccgtgcgggagcgtcgtgcacgcgatgaggaggatctcgatcgcgagcgagcgcgccgcaaggttgggcgacgtgagggaaaaggcaatcgccgagaggacctggggctgctcctcgagatagtggagcccgcgccagtccttaaagatggtcgcgagggccttcaggatctccagctcacggtctttgtcgtcggtcggcttgaaagcgccggcctggatccgcttgttgccaatgttgccgagcgccgtcgcaatgaccctcggcccgtgcagggcgagaaactcctgctgccagtcgagcggtttggtccggaggcagacgccgagggcggcaacgtcgcggatttcgactcgctggtcgaggaacatcttgacaaacttctcgggctcgtccttgaccatcggcttgatgtcggtctggacagtctcgcgcgcgccgccgcccccaccgcctccgctcccggcagactcggtagcgccagcctgcttggcccgcgcgcgctcccacttctcctttgcgatgccgtgcatgagcgtccacttcttgtctggcggtagggctcgcagctgctgagccgccgcctcctgcgactgaggggtcgggttctgcgccttcgcagaggagtgatagccatgggcaactaggattggaagggcacacgaaggtcagcattcggactgggtggcggaatgccggcccaaaaagggggggggggacggaccggtttgggagagcacttcagggatgaaggactcgaaggcggcgtcaaagtcggccggagacggctttgggtaatcgaacgtctccgagacgaacgtgagctcgcccttactcataaagctgtaccgcgacccgccgcctggaccggcgctactcgccaaagacggcggcggccgctgaagaggcggattctgctcgaccgtgtggatcgagctcgagtcggacgggttgaaggtcggataccggctcgacgagttgttgcgtgcatgtcgcgacgagtgggtcgacatggaagtcgatggtcgagccgatagcgacggctgaggcgtcgacgaccggccgttcgacgagagctcgagtggcgtctgaggccgatgagggtggccaccgctggccgctatggcaaccgcagctgcagaggatggccctaatcctgcagtgctgagcctgctgctcgagccgccaagctctccgtgctcagcgggcgccgaggaatgatggtgtacgtgctgctgctggccattcggccctcgtagggaggccgaccctcctgctccaccagcgccgctcgacccggctgtcgtgcggaaggacgacgcctgtgaaggcgtgcggatcggccctcctccttcgactcctgaccactggctgctcaggccgactgatcgaatggagccggtttccgaagctgactcgcggtgcggatgagctcctgacgagggcgagggcgcgcgatgattcgattcgcgtcgcgtcggcaactggtcgttgtaaaggttgagggccgtcccgtctgccgtgagcgtcgggttcgtattgggcgacgagatgtagcgacccgaagtgctgtcaggggaaggccgagagcgaggtcggtcagtcaactggccggtgtcacccagctgctcgtcccccgtcaaagctggtcttcgagctcgagcgaagccagcggtatctggagagacgtacgagctcgccggcttggcaccaggcgtcagccggtcgtaagggacgctcatcaggccgaggtcgctgacttcccggccgctgtccctgagggagctcgaggtgctccggatcgaggcctcgtcggcggccgtgcggctccgcttcgacttgaacatggcaggagctggctggacgatcggggcctcacacgaaacaggccggctggcgcgaatgggcgagcggtggttgaagagggtgaccggtcttctactgggcggttcgcatcagggcgcggcagaaggaggcgatggcgcggggaggggctgaactcgggagagcggtggatccgagcgtccggtcaagcgagatgtttggagagccttccaaagccactagaacgtgctggtctgaagattggcttggaaggatgaacgaggggggagaacaggcacaggacgacaagggcggctcggccaactgctggcccgcacgaccgggtcgcgcctggcgctcgctccctcagagacgcacacaaaaggctcggcgcagcagcccactcgtcgaagtcccgcacggccgtcgccccccggtctgaaggctgagctttgaacgccggcgagcagaggtttcgtgagatctcgattacagcaggaggcagaggcgggttcgatacaggcagcttctctcgactccctcgtactcgacgccgcgaacaggaataccaaggcagccgtcgaggcctggagagcgcggccgtcggctgcaaggcgcttgcctgcggaggttggtgattcgcccgggtcacaatcgagcctcgccgggcgcgcgttgagcgttgtcttccgccgactcggtccgtttgggcgtccggaaggttgagaggtcgtgtcgtgtcggcagagcaaggcgagaaggtcgagcagcatcgcggaggagtctagatggagagccagaaaggtgagaagaagaggcttggtgttccgagatggtgaggagacgagaagcgggagggaccgctgtgtttcgttgggcgcaacgcggttgccggcctagtcggccgcggaccttagtggcggctgagggctgacggccccctttggcggaccaggggcggtgatgtgagcctctgtgggaaggattcgggcaggaggggcagtcggtcagtcggaggtcggccagcagatcttcgggcgagagacggaccagcgagcgaggcggccacctgttcaggcgtcgggccttcaggaagcgtggtcgagctggccgtcgaacgagaggccgaacctgccagcgacgtcgtcatctctggcggcgcgcccgagccggccgggatgatgggctctgtcgatgccgtcgatgccggagcctggcgctgcgggctcaccggcgagtacccgatcgggtgagagctagcggccgactgaaaggagccgccgctgctgctcgacgacatggacgagccggcgaccgttcctccccgctgactagccgccgctgtcggcacagggacagcccgggcggctgatggcgatgtgggcccgttggaggcggagggtgcgccagcgccttgcggccagatccatgaccggatcttctcgacgcactctttcgggtccttaggcaggctgagagcgcgatgataggacgatgtgttagccatctgtgcttttggggggctgagtagggtgacacagcccgaagagccgatgagggggacgtactcgatcacgccacacagcggcacatacttgtcgcccgcctggcggaagtagcggagcggaatgttctcgtcgccccgctcgcgcgcgcgctcacgctgacgctcctcgaccgcattcttggcctcggtcgcgccctccatgtcttggttgcggatcgcggccgtcaggcccgaccagagccggcgcgactcgttcggctcctgctccgactcgggcgccacaatcttgggcgtgacggacgcgctgtgggcgtcaaagagcgtctgcttcttgcccgtctgttgaaggcgcaggcgctcgtcagtccgctgcccccctcccccgcggctcgccaaggacaacaaagcctcagacgcaccttgacgtccttgtagacgacgctatcggaccagaagccgtcgaggtcgccgatcgtgtggccgtccttcttgaccttgccgacgacggcgttgtatgtgcccgagaagaagcccttggtcttgaactcgacgtcgcacgcgaggccggtcgtcgggttccggacggccgacgtgtcgccgagctcgagtatgagcttgccaaagaggatgccgcgggcgtacatgtttggcatcccgatcgagtactcgccgtcctggcgcttgttcatcaggatgacgcgattctcgccgtccatgatggtcgccgcgctgttaccgagaaacttagacttgggccggagctcgccgtagatgagaacaccgttcgcgggcgagatgtagaagtaggccgacaccggcgggtggtgcgagacctgctcggcgacgtaaaagccctcggagccatccgggtagcggtacgagcatcgaaagatctcgcccaggacggcgttgtagggcttcttgacgcccttcggcttgatgtgccagccgctgaggtagtagcgcaagacggccaggaagcgctcggtcgggtcctcgttcttgtcggcgctgcatgggccgagaggacgaagtgaaaggaggagcggacgcagacgagaagcgtgcagggaagaaagcaacacgaggtcagccggctgcatgtgcacctcgcctgcttcgagggcgcgctcgctgcgcggcgaccaagactgacccaaagatgaggtccgggtgggaaaagaagtcggtgatgcgctcgagcatcgaccggggctcaagtacaaaggtcgggaaggcgatctggtgacaaccgagggacaagttagcggccggttcgagtgcgtgcacggtcgtgcgtggagcgggctgctcgcttgctgccgctcggcgagggacggtcgcaccttggagaggtccatccccggtcgaactggaagagcgacaaagcatcgactggtcagacacgagtaaggtgacggcggccaacgcggggaggcggccgagagccggccgccggcggcagaagccaccattggccgacccagccctgcgccatcctcgacgaagtttggcttgtcctgacgacgcagaggtaggcggacgaacgctgagagatcatggcgaggatgacattgccctccttctcgtcgaggaccgagacgtcgtcgccctcggcgcccttgtcgaccgagtcctgctcgagtgacggccggccgtacgagatggagctcgaccgcgtcttctctggcgtcggcgcaccggtcgcctttttgaccaagtcagagaggcccatcttaaaaagaggctcgtgatgttgcgagaagggaggagggcttgcaggaaagatggctggcgaggaggaggaggccggtgcagagtcttcgttcactcggcgatggcggcgcggggaggcttgcgcgtcagcggctcggagctgtaaccctaaccctaaggagcctccgagtctcgggacgcgacctgcggctgccatctcgagtcgcctctcgtacaaccagctgctgctgctccaggaatgtcgtctgcctggcaggacgacctcgcacgcgccctcaagcggcgcaacactcaggaacacgcctatgccgatcttatagtcagctgtccgttctctcctcctcgtcggcctaccgtgcaatccctcctaccgccggcctcgagcgagccctgacagctgtctcaacccttcctcctcctacttagacgccaagctcgcccggacagcacgcggtctccaggagaggaacagggctctcctcggtgcctcccgacaggtccgcgccgagccgtcaacggccgcatcatcaacagcaggcccggccggtagcggcgacacccatcgcgcctcgggcaccagcagcgctggcgacgggtgcgttcgcgaccggtagtctgagcttgctttgattgtcctagacttcctcccggcgtccgcaatctattcagatcacggcggcgcttgtctcttcgagagaggctgccggggatgtgacaaggacctcttcgcgcgcagtctgacgagctggcccgtcgtgctgacctcgatttcttgcatctttatccttcctgcgccgaatagcaaccccgtcctcaaagcgtacgccgactcactcgagagccaggttgccagcctccggaccgagctctcggacgcctacaaggcccagggccaagcgacgcttaagctgctctcgctgactgaggtctgtcccgcctcgccttccatcctgagccttggtgatgaggttccttcgctgacgcagctgtcactgctcttacggagtaggctattcaggagaaggagacggagcagcggactgagcgggacgagctccgcaggctgaccgaggccgaggcgcgctggcggcgaaacggcgaggagtggaccgagcggcttcggatcaaagaccacgacatcctggtccatcactctcatgcttccatcctcatggctgcctttctgaccatcacgccctcgactcttgcagaaccttcaagacgaggtcgccgcgctcaacctcgagctgaaccagggcgcgctccggttcgatgcgctccggcgcgacaacggccagcttcttcagcgctggctcgacaagatgggccaggaggccgacgagatgaatgatcggtcgggctttgtcgaggccgaggtgcgtttgagcggcccattggacgaccttcagagctactcatccggctgaccgatcgcgcccatgatcgcttacctgaatcgcaggcctcgcaagcagctccgccgaggacaaggacaacatcagccactacgcctccgtcaagggcgaggactacgtcggcgaccaacgctagcagcagcagttcacgcctccgaccgtccagctgatcggctgctatcaaccggttgcaccgcaacatctccggtcgtcagtcaaaagcgatcacgccggccacgggtcgactcggcgcgcctccgaggatgccaccacctttgcagactggtcgcctgccagcaacctgcctcacggacgtcacacagcttttgagaccaaatcgaggtcgatccgagccgcgccgcgtcgggacgcccgttgacgctcttcgcacactccagcgggttactcctgaaaggtcggccatttgtagctcaaggccttgcgacgtctcacactgcccttatgcgtcccttatcatggctttttctttgagctcctctcggctgacggggaaggcaagacgcccatcactgcgtctcgcgcgacctctcgatccggcgactcttagtctggcaggactggcagcgcccatctcagaggccaaggaagccgttgccgcccttccagtcacccaagccgatcgggcgtgtgggccggacgagctccttcggcggctcgaccggcgaggcgttcggctcgaccggccagagcgagtcaaccgccttgagcagggccgactcggtcttgatcagctcctgctggagctcgatgcccgcccggcgatgttcgagcgtcgcaatcagcagataatcgaggacgggtgcggcgtcggctgatacaagaaggtcgacttgtcagtggtcaatgcactggcctctgatggctgcaaagaggcgcaccgatgagcgtcttgaacttgtcgacgagacgcgcgaacgagccgagcaaatacagttcctcgtcgaccgtgcccttgcggcccgatgccgccttgcgagcattcttgcgcttcattttggacgactgattcgtcgtcctgcaaaggggggagacagaggagaggaagacggtcaggccgacaggtgtaaggggaaaagatctgagcgagtcaggacggactttgtcaagccggtaaagcgcgtcaggacggtcgacgcgttgttcgtgtatcgcgtgaactcggtcgcgcccgttgcgtcggtcataacgtcgatgttttcgagcgccgggtcgtcctgcatgaagaaggtgtccggttgctctgccttgaggatcgcaagctcggccaaacgtgacagctgcttctccatctgctcctcaatctcggcgacgtcctcgaggatgaaagcctgcgtcgctaggaggctcgggtggatcacagactctatgagttccggcttgtcgcgcagtgagctctacaagcagggccagatcgagagtcagcgtctctccaacagcggcttgcagatggcggggacgcacaatgcggtaggcttcggcataatcgcggccctggcagaagtttgagaccgcttcctcggccaagtcggtgccatagtcgagcagaacgcgaccggcctcgccgtagcgggctcgcgaggagagatcgtctgccagggcaacgcatcgagtcagcagtagatcaagtcagtctggtagagcttcaggaacgtactggctatccgctggacgaggtcctgcatctcctcctcgggcagcttctccagcttggcgagcgtgaaaagctccttccaagcatgcgccttgtcgtaagacttgagggcccgggcgcgattgccagccatggtaaaggctgcgagatatagcggcggcccgagtcaggaacaggaaagcgagtccagcatagaatggcgacacgtaccgagcgcggcatcattgaagttgcgtcggtagtagaggtggtcgccgtagatctcgtagatggccttgagcggttcctcgtcgtcggaccagatggcgagcgcctcgcgatagaggtcatgcttctcaatgtagtcagttgcctcctcaaagtaggccggtccggcaagctgcagattggcgagtgccttggcccatcgctcgaggtgatcgtcgatgcggaagcgctgatagaaattgttgagcgccttgagctcctttaggaatggcagatactcgcggggatcctaaacatggcgacagggcaggacgtcagacgtcaacgtcagcggcaggtggccgggtgacgaccgacggcacacaccttctgcgagaactgggcaatcatgaggacgaggccaaagtcgtacatgccgagggcgacgtcgaacaaccgattgacatctgtcaggaagatgacgtatttgatggcgtcctcgacgaccttggggtgctggcctgcaattgcgagcggagaggtggtcagcaagcgcaactctccagtgtttgcgcgttcgattgacctttcagcctgtgcagcattcggagagcctcctcgtggtctggcggcgtcttgacgacgtgcgccgtcaggatcgagtcgacatacttgagcatgtcgcggtcgagctcgcgcatcatggcgtcgcagatccgattgacctttcccgggacctcaaaggacgaggtcgatgcggcaggcaggccaggcgctgggtacatcgacttggagacgtcctcgttcttgaggccgccgaggatgaggttgatgtggtcgacattgtcgatctgctcgacgataacggccaggtcgcggaagaaggcagctgggtcgtaatcgtgcaggatgttcatgtcgatccggtgcttgcggcatgtgacaaaggcatcgcggtaccggcctctgcgggtgtcgagggcgtcaatgcatttcgcttgtgagcaaggagcaggaattgggcctcaagggatcagaactcacgcgttgaggtctctccggacgcccgcgaggacgagcggccgaggataaatcgtttcgaggttgccgcgcggcatctggaggatgagcgccatcgtcgtggagatgacggtgacgatgacggacccccgctcgacacggcgcgactcccacgtcttctcgtgttccgacacaaggtagccgccgtcaaggatgcggccaagcaccgtgagaggggcgtacttggactcatgggtcgtcgtcgtgtagatgaggaagtcggtcgacagcgtgaaggacgtgcagtcggccgcgacctggtaggcttcgtccgaggccgcagagagcacgaacagtttgccaagcggcgagagggcgacaaggatcgggaagtcgccgacgtcagtcgccttgacacaggggcagaatgtcgatagcgccgttggcagcggctccaggtcatcctccgggccagcgactagccagacaggacgaaaagagcgaaggtcagccgagaccttggacggccaagaagggagggagcgtccgatcaggcacgcacaaaatagcaagtcgcccgccttcgactgaaagacgtagccattcagcgcggccgtgatgttggcgcggccgatgctcggcaaagcgatcgattcccaagccgccttctcgttgtccagcttggagaaccagagcgcgtcgcagagagcgtcggcgtcccatccgaggacgactaccgagcctttgccatcctcggccaaacgaagcgatatctggcgggctcgcacgtttgggggaagcggcaggacgaccggatcgctgtaggtctggatgcgacctggctggctgcggtcgagctttgagacaacgtgcctgacgtgaacctcggtcgcaaagagaagggcgaacgcctcgtctgcaaacgcagccgacggcgaggatggcgcgagcaacgacggagcgaaggcgacgtggattggcggctgaaccggccgactcgagtgagaggtcacgagctttgtcgacgacatgggcggagggacattctgcgtgcggaaaggcgtgacgaggagcgaggctgtcgacgcacgccggtcagcttaagattctccgcttaagatcctccgctctgagaggcgcaaagctcaacttaccaccatccgtgacggcgaccacaccggcgtcgcgcggagcgccgagactcggaccaaaggtgtcccagctgaaagagcgcatctcaagcgcgcctgccgtcagaaccgcgagctccatcgccttctcagggtgccagctgacggcgaggaagggcgagcgggcgtccgaaagcggcgtgatctcctgtttgaggtaccagtgatagttgttgcgcatccagacttgcactaggtggtcagggagattgtcactcgactcaggtcagctcgtggcaggatgaatggggaggagctcggtacataccgacgtcaccggcgctctcatctctgcgcagccagacggcgagcaacgtcgagtctgcattccagcagagctcctgtacgcgatactcccagccccagctgagacggcctccctcatcttcagcgccggcgtcggcacgaatcttgccggcgccctcgcggagctcgaactcgccgtgtcgcaggccgttgcgctcgaagaagacgacgtcgtgtcggccttcacggccctcgcccgcgccgtcaaacgtgccaaatcgctgggtggaggcaatcagctcgcccgacggccgccaggcaagtacgtgctcgaggccaacgaccggctccgacgtcgactggagctcagcctggcgcgagtaggtccggacgacgcgccgggtggcattgctgctcgcggacgaagtgccttttgccgagaggtcgagcgatgagatggcaaagtgggcgccgtcgccgcgccacgagatgcgtggcgcgtggtcgtcatctggcgtcgacgaggtccggtcggcagggatggcttgggtcatcggcgtctgcgcagccgtcttgccagccgagccatgaaactgcgtctgcttcgagccccagccgacattgatgtacttgtctgcatgaaggaaatgagcaggaagtgaataggctggcgggagggaaggtggtgcgtacgttatgccggtacgtgccttcgccaaagtcgtcgctgcgcagtcggctgtctttgagtacctcaaagtccttggtcatctcgagcagcatgtcgtcgcctgaagagacgcggattagcgacggccacgacgagggtcgctacgtagcgcgatgattagacgcaccagtgataaggatcagcagctcctcgtccgggctccattccgccgccttgatgccggcgtcgaccatgccgacaacctcgacctgtttaagaagtgcaagtgagaagtgcgctagaaaagaggtctcacggcgctcgtgcgactgacgttggcttccgtggcggattcggggctcagggcgatcgtcgtaatgtcgccgccggcgaggatgacgcaaagcgactgactctccgaaaggaagcgaaggctgaggacatgctgcctcgccgtcgaataccgaggcaggaagctcggctcggcagacgccgtgagagatgcgatctgacatcgacgaggatcgagaaggaagcgcgaggtcaaggtaggatggaacgtcagcccagctcactcgcaggtaggcgcgaggcacagtctcgaggcgccgcgctcggtcgcgctaacgccgcccttgctcggcctgaaacagcgtttagggccgtctacgaaacgcaccagctgcatctgattcgtgttgatgccggcgacctcaaagatgtcgatggtcgagcctcgctcagtcgcgacgtagacgacgcctgattcagggttgaaggcgagagccgacgccgcgcggtcggcggcagctgaggcgctcgacccaggactgccgcttccgcccgagaccggcggaaggacggcgttgatggacgaaagacaggtcaaggagcgcatctgcggcgcgcaatgtgggagctggcctcggtaatcgagagcgaggtcgatgtccggagctggtcgtcgtcgtcgtcgtcggtgcaaggctcgacgacctgggctggaactgcatctgcaagtcgacaaaagtgagtgcggcctgcgcgcaggcggccgagccagccgttgctgctgctcgtcctcgccatcctcgcaccagtctcgtgcagaccctcgcacgttgccctcttacccctctcgccagatcctacactatggccggaaagcaagccaagctccgggcaaaggagcgccgcaagaccaagccgtacgacaagaagacggccgcacccgccgccgcgctcggcgagcgtaccgcagacggcagcgccgtcgacgatgccgacaaggcggacgacgagctcgagctcgaggcgttcctctttggccgcaagaagaagtccgcccgcaaggcaccagtcactttctccggcgtcgaatcggtcccgaaggtcgaggagaccgctctcggccacctcgccgatcaggaggtgcgtctgctgccgccttcgtctcctgagctttcggttcgttgaagctgatcgcatcccttcctcgcctccatagcttttcttcatggacgctcctgaagccggaccgtctggcagcacctatgccgccctcgacgacgactttgagctgtccgacggagaggaggaccagctggccgtcgagcactcggacgacgagacggacgacgactctgcatcgtcgtcaggcagcagcaatagcagcgcctcttcgacgcattcggacgactatgcagctggtgtcggatccagtagtaaatctcagggcaagaagccggcatggacggacccggacgacggaggcatggagattgacattgcggccgattcgcgcctacgcaagctgcgtcggacagtcgacgaggaaatcgtcggcggccgtgactacgagggccgacttcgcgctcagtacgtctggtcgcctagcgttgggtaggaggctgcgcataagctgacagtcttgttatcgacgctcaggtttgaagcgctaaaccctcggccggcatgggcatctgcggtgcgcgaggcgcctaccgcgctcgaggcgctcttgtcgtcatcgacgcccttcctctcgcgcaagggtcgcgcaggcgtcattccgagcggccagatcgacatcgagcgagtgcgcgatgtcaacggaggcgaggcgggggtcaaggcgctcgcttgggcgcctcgtgccggcgaggccgagggccagcgtgacatccttgctgtcgccggcggcgatcgccgtgtccgcatcttcaacgtgagtcgtcgcgaagacttggactggtccaaatactccgcgacggggcaagctgacgaccctctcttggcccggtttcagatcgacggtccgaccaactcgttgctgctcaccatgcaccttcccgcgctgccgatctcgaccctgacgttccatccgtcacgaacgcatatcctccttaccggctcgcggccataccttcagatcctgtcactcacgacgtcgacctcggcccggttccccatcctcccgccgagctcgcccatcccggcccccaagtcgctcgcggccgtcgctttctcacctcgaggcgacatcctcgcatgcgctggtggtggcggcatagtctacttgctcgcatggtccgagggagggcctcaaggcttgatcggcacgctcaagacgcccggcggaagcggcaagggtggcgacggcgtggaggggctctactgggccaaggacggcgaggagctctggacgatgggcggcgacggcggcgaggtgaccgtctggaacgtaagccagcggcgttgtgtcgctcgttggcgcgaccaggccaatggcggccctgccggctggggcgagtggggcgcccgcatccttacgggtaacgaggagaagggaacgaccgctgttgggtgcgtacctctgcctgcggcctttcgatcgacctgggcgctgcgactgacattattctccccttgcgccagatcctcgaccggcatcatctcaatgtacgcccggtcgaaggcgacatcgctcgcgggcgagtcactcgccgacagcgccaagccccctgcccacctcaagtcgtttgacacgattacgacgccgatcacgacgctcgctttcaacccggacggccagatcctcgtcgctgcgtccaaggacaagcgcgactgcctcaagctcgtgcgtcctgtctccttccgagaacccactcctgtctaggccggaactgacaccgccgccctgctcatccctcccagtaccataccgagagcctgacgaccttccagaactggccgacgcagcacactccgctcggccacgtgacggccgtcggctggagtcctacgagcgagtaccttgcgatgggcaactcgaagggccgagtccttctgtaccgcgtcaagccgtacgccggcctgtgatggatgccttgtccatcgagtcatgtcctccgctcgcgcactttgacgcggacccccttcgtttgaaccggtcagagtcatgaccacatcaaccttcttggcttcgtccgaaaggaggcgcctcactcccatttgacccactcgtcaacgacctcccatccgctttcctcctgcttcttcatctgcgagagcatctcctcgtagcggtcccaccagagtccgtggaggtactgcgtgctcgggtcggccgacgacgcagtcggcttgtggcgcggcgcctgccagggcttgtcgagactgcaagcgcaagggcgaggggtgtcagctggctaaccgggaatggaagcggacggtctgcgcacatgtagtggatgttgcggacgtcctcgtcccgccagaggtcggggtggatgatgcgcagcgtcttgagcgcattgtagacataagggacaggcgtccagcggcctttaaagaagctgcgggcatgcggcggtggaaggaaagggtcggcatgcagactcggtcgatcagcagggtcgatgttcaaggacgcacgcggcgtagaggtcctggtcggcgaacgagaaggtcgagataagcgggctggtccggagaaagacgacgaggtcctcaaacaagctcttggacggcgtgaggatgatgagcccgccgttgataaggccatgtccgcgcggcgcgtcgggccgaatgtcaagcggcgggtgcgagagcaccgaggggtgcgacatggaagtgtaggcgcagtttgccggcgtcctgcgcgacccgacgagcagacgtcagacctgatgaaggacagtgcctctttggagccagcgacaaactgaccagtctttggggtagtgcgcaagcttgcgtgggttacatgtgcaggcgtgcgtgccagcgacccagtcggcgcccggcagtggcagcgtgaagaggtcgtccatgttcctgcggggacggtcgggcgaatgtcgtcaacactggcacagagcgagcggccgagcggcctctgcttacttctgaacgagcatgtcgcagtcgagcgtgatgatgcgctgtcctcgcgagtgcagggtcagggatgaggtcagtctcggctgcggaaggtgcggcgtcagccgcacgaacggcgcaggctcgcacctcgtactcggtccactcgaatgacctgaacaacgacagcgaaactggtcagcagtctcacaagtcgatcaaagatgctcgtcgcgcacctgaacttggtccaggctggggtcgggcatcgaaggcgtttgatgcgcgtcagcagcagcggaggctgaagcctgagtgcttcgagggaagacggcgactgactgtccatgaagcgcaggtcgtgctcgttgagctcgtgcgtacccgcggtcgggagcaggctgtcgacctccttcataaggatgccggctttcgcgcaagcgttgcgggcctcggccgggaagggcttggtgatcatggcgacgagcgggtagcgcgacggcggcgacgtcgtccgcagcgcatggttcaggacgagcagaccttgcctgatgcgcggagagcaagacaggaggacccggcctgccgtcagccatgagctgccgagagtagcctggcaagcctagggcctggcaaagagcggcgagcggcgtcctgcacgcctggcaggatgcgacgcgcacgctccggctagggccgacgatgggctcgcagccgagcggggtcaataacgcacaggtaggacgacttggtgcaaagggcgacccaggcgcacttggcgtctggcgagggagcgatggacatggcaggagtagtgtaagagggtcgtgggttgctcgagcaggcgaggagggctgagtgggctgaacgaacaggcgtcgctgctgtcgatcctcgccggcacagatcgatcgctcgaaagcactttaacccggggtcccgcgcatgacggtcccggccgaaatgctgaaggcggcaagaggggggttgcgcatcttcatcgcaaggctactggcatcgacgcggcgggctgcgtttgtcgcgcagagagcaggcagaactcgcgtggcctgtcgtcctgcggaccagcgttggcggccgacttcgcgcgtggccgacaccttgccgacgctcggccagcggacgcaatccaacgacgagccactaggtgccgtggccgggcagagcgtgtcgagagtcgcgcggtgcgtgttgaaatgaggcaccgcggcctctcgctgtcatcaggggcggcgatagggcttccgtgttgaacgtcagcgctcagatcaagaccctccaggttggtagcgacgctcacctgaacatttcgggatttcgaccgcgaggagggcgaggtgacgctcgtcactgcctctcagggttctgcctcgtctcgcttccgcttggcctcgcgctcggccttcgccagtcgacggcgaacgcgctcctcctcccaccctggccgatcaccctcgcctagcccgccctctgcgccaaagccagagccggcgctgccagccagacgcgccattactggctggcggatgaggtcgagttgagacgctgccccgccggtgatgcggcgcgagtgacggagttgcgagttggaagcgctcttgctggtcgccgggtcgggcggcggcgcaggctcgagaacagcctgccggctgaaagggaagataatgcgcgacacgcgcgaatgaagcagcgtgatgggaagctgagcgtgagagcaaaagtcaggcagcggggtgttaatgtggagttgctgacaaccgttggcagcgtgcccaagttgcagagcagcctaacgcaccggtccatacatgcgcgagtctttcgattccttctcgttgtcgccttcgacccagacctgacccttctcgagcttgacgtatcgctgcggatacggggcagccgcctggatcacatcgccctgtagcgagcacaacattggccgcgaggacggacaagaagtcagctcagagccggcgaggccctcccagccagagcctagtacagacctcgacaccaatgatgcgcttgactgtaagccgacgctgattggacgttggcgacctgaagtggtcgacgacgcaaaagcgaccgacgagcgagtctggtcagctggacgtcctggtcagctgcaccgccaaaagggggacgcaccagagcgtgacgacatcgcctcgagtccagggtttgccccaggtccggtgccacttgtcgagcaggatccaatcgcgctctctagcttgcgcccagtcggggttgagcgtcggctgcgacggagggaggtgacgtcgaagccgagatcagcttgagcaagggccgccacacagcgcgaatctgagcccgcacgcaccgtcatgctcgcgccttcgacagagacaatctcgaagctgacgtcggttgcaaagagggcaacgggaaccctttagaagagagcgatcgagaggcaggtcgtggtagtcagcctcggaagctcacgcacgtgcctacaggagctatggatgccgcaccaaagcagaagtcgtctagaggtcgagcgatcgcgagcggaggggagagcagtcgtcagcatgtggcctttaggtggccttccagcctgttctgagctgcgaggggatggaatgacgagagctcacaggagctcgcgccggcgaggaaacggcagccggcgagggacggcggcggcgtgctccatgtcctgataatcaggagggtttcccttatctcacacccgtgctcgagtagcaggcagttttgaagctagggctgtcggcgatgctgagcaggacgtgtctgaaggagggctggcggcaggagtgacgggtggtagggaggtcgggcaagcggccgttgagctcgaagcgccggcggacacggatgcgtacgcatgccacttgcttgccacatcgagcgctcaacaacagctgagcctcgctggtagcgttctccgacagttatgggtgcacgtcgggatcgggaaaggaaggccagggcatacagagagaaaagaagggcgcaaagaccagcaagcgcgggcggttcacatttgtgagaagttggaacgcgatggtcggcactgaaaaagtaacgactgactgcctcgggcgggatcgagccgtttgtgccgttgttgctgatgggagtcgaaccgccagggcgactgagtctggcgcgcgccatcgcaaacttgcttgccaacaggtttatgcgagtcatcagagggcaactgcagcgctgcgggccgagtggtgaacaggaagtggggtcgtggatgggtcgtgtgcaggaggaggaggtagggcagagagggcttaagcggagaggcccatcttgagcagcgcgcctggtcatcgaggcggcgcggtcggttggttggcgtcagcaaggcgatcctagccaacgagcaggacgcgactcaccgacgacgtcgaccgtgtcccaggcaggacttggcgcagcgtctccgtcgtcaccctcggtggcagcggagccgccctcggccgagtgagccgctttccgcgctgagacaagtcaggatgtttgggaacgtcagctcggcgcctgtgacagccctggccggcaaaggacgtacattgtatgtagatgagcgtgttcttgaagtgctggtggatcatctctggcgagtggacgccatcgatcaggcccggcgacgactttgacgaagggtgcatgtcgctcccgtggatcgagtcaatctcggacgtgatgacgccgacgagcgaattgacaaagcggacggtgaccgtctcgacgccctgctcaaagtagtagaggaactggtgggagagtcagggggttagccgcggcccgcaggtagcgaggagcgaacgtcacggacctggtcgagcgcgatgcagtacaggtggacgctcatgacctcctcgatacacgagccggcaatcttgatcgacttttgtaggcactcgagcacacgcttcgggtctcggaacagctcctgaggtccaagaagaagctcgtcagtggcgaggctttgggcccgattgagagatctcgacgcacattgtccttccggctattgcggcctgggatctcgttctgccaccagagatggctggctgagagaacggcagtcgcctgttggggctttttgagcagccggttgccgtgcagggccgccttagtgatgagcgtgtcgtagttgtcgggcccaaacacccgcgcggcctggagcgtgcggatgatgatggtgatcgcctggagctgcgcccggctctccgagatggactcctcatagatgacaaatgcctggacgtaaaattcgtacgcgagctcctcgaggccggcgtcatcggcaacctgggcggcgagcaggaacagccgcagacacgtctcggacgactcgacccggtggtagagcgttgagatgagctggtggacgaatttgaagatgttcgagaccttggcctcccactcgtcgtcctggcgaggaggagggccgggcagggtcagtctggacgctcgtacaggctagatgcaggccaggatgtgggaggggccgcacatcgtcatccagcagcgtacgatgccggtgagcaagctggatggcggccgtgatgagcggcgggaaggtgtagcggatgcgatcgccgccttcgctcagtgacttgcgtgccgtttgcagcagctgaagagatcatccgagggatcagcgtccgcatcgtccgtggaaagttctggcgactgacctggaactggatctcgaggtcgtccgaccggaagaggtggaccatgcgcgcgacccagccctgctcttcggctagatcctcggcgtcgtactcgcggacgtgcccacgtctgctgccgctcgtcgtgtagccaccgccgttgctcgaaccggcgccagcgtgcgcgacctgactgctgccctccgtctgatccttgattagcacgctgcacatgccaagcacgccctcgacgtcctcggccgagtcgatgatcgtctcgttcttaaggaccgacgagacgacagcgtgcgcgatcgatcgccgtgagccgaacggctgcgacagcagcagcggtaggtaggacgggatcgcaagcagcgtgagaaccgacgagtacgagttgatcggcgaaagcaggagcgccagcaagtttgacgtcgtcgtcggcgtgtagaggtcggccgagctgccgtactcggtaaccttggcccgggcgaaggctagcacctggtcgacgtattcgagctggtctgggtagcacgagagcgagaggttgatgagcgagacgagtagggcggtgatgtcctggattggaaggtccggccggttcttgatgagctcgacgacctgctgccagaagacctcgaacaagcgaacgttctccgggatgccgcggaacttgcggacgccgctcggtgcctcgccctgctctttctggccatccacgctagtctcgcccgcaggcgtcgccgtctggtcgccctccgcctgttcgggagcgccctcgccgctggcccacatgtcggccccctcctgcgggttgaccttcttggcctcgattgcgccaccgcgcttgcgctcccggatcttgtccgacaatcgcttggccgcctcctcttcgccgcgcgccttgtcctcggggctctcgttctctgcctcgcgagccgcgtagctcgcgaggcggtcgatcagggcgatgacgattgacttgatattgacgcgcgggtggagcgctgccgtcgccgagaggaaaggcgagagggtgaagaggtggaactcgtcggtgaagacctgcaggggaggggggcagagtatcggcggctcaatcgtctgggtgcagcaacaaggacgactgaggacgcacctggatgacgacctccatcaggtactcctgtgcgatgacatccttgcagccgacgacctgctcaaggatgctcggcaggattatgcccgtatacatgccgaggtcgacaccctccagctggctcagccggacgaggttggtgccgacgagaatgcgtagctccttgcgctccatctcgcgcttctcgcgctcgcgcgagtggccggcatgctgcagccggacccagagcttgttcatctcaatgaagttggtcaggacgaacgagattgagtcctggaggtttccaccgggtctgtcgcggaacaagggggggggggtgttcagtcggagaaggcagagctggcgcaagcagagtcggctcacccgtcatcctcgcctatcggcagccagtcgcgcgtctgaccgctgaggtagtgccggagaaagaggccgcgggtcgcgtgctggacgccgcgcgtcatctccatcatgtccttcatgatctccttgaccggggcatccggaatcgacatgtagaccgagccgacggtgatcatgaggtagagccgctgcggggacaaggcgagcgaggacgggcgcgcaggcgcggtgtcaggcctgcctcgagtgctcagaatcgaccagcctgaacgtacagggaggatgttgccggcgtactgaacgatctcgtacaggtcggcgaggtgatgcttgccggcgacgtgcgcctccgagaggtacgtcgacagatgccgcagcgcatcaaagacggccatgtctgcgccgcggaggggatgatcgctcatcagtcgcccgaccgtgcctacgaaaatatgtagagggtctactcacagagctcgtagtactgcttgggcgagaggctcgacgtccgaagctcggccagcatcgtcgaggccgacttcagcgcgtccatcaggaggtcggcgtcctgcgaagcgatgggcgcgagcgcggtcagctgcgtgctcgcctcgggcgttcgagagctgagtctcggggcacaccagacaccgcttcatttggacgctctctattttgaccgtactgtaggtgagcaggtcagggacatcgtccagtcagccggctgggtgcgatgaatggagggaaggtcgagcgaggagaccgcggtctggtgacgccctcggaggcacgcacctgagcgcctgggtgaggagcttgccctcatcttgggccgacgaggccaaggacgaggccatgacaagggcagcgagatgcgttgagtttcgggcaaacggggtgtcggtcgaaaagggtcgtcgtcggcgtgctgatgggcaggcgtctcggccgaggtcggtgcggcgcggcggcgcgagcctccctgcttgcatcgaccgcgcagtctccccttcctccatctcggttgcccctacattcgtatgcactatgagatgacgtcaatgacatcagagagcggcagagggcgagagcaggagggagctacgaggtaaaggacgagaaagaggagacacagagcgagaagggggagagagagctacgcgtctaggccgccttgcgcttcgacttgcccgagaggtcgccgaccgggaggacaaagtacgacgtctcgggcggtgacagagataggacgagagagagagagtcttcctgcgcacgtaaaaatgaaccagcccatgaggtagatgccgagcgagttctcgagctcaccaggcgcccagtcgaccgacatgatgcccgatccaggccactggacgacggcgtaactcagccaaaaggcgccgtacgccgtgaacgcagtcgctccgaaggtgttaccgcacgcgaactaaagggagggtagagtggaaggagggagggagggtcagcgccgtgctcgagacagacggaggaagcaagacgaccgacctcccacatgccagccaggagctgggcgaggccgccaaagccgagagcgagaccgacgacgacgttcgggtgctgcaaggagggatcgaaggtcagccggggaggttcgaatgacgagtgacgaggcttcaagaaggaccgaccgtaatgtcgcggacgccagtgttgtaccacgacaggacaaacgtcgtcgtcgcaaaggccaacaggccgagcggagccggattcgcaagtttccgatggtagactgggaatgcaggctgcgacgtgtcgaccgggtggccgccaggcgtcaccgcccggtgggcaaggtgcgagttgtggccggccgtcgtaccggtgaggttgccttcgagcgtgtggtccgagccattcgtgtgagcagggcgagtgccggcaagcttctcgacgtcggccatgatggaagctgctaggatcagggggtggtgagggtaggcttgaagagaggtagagggctgcgagagagataaatgtcaaagagatggagcgctgttgggagcgccgagagaccggcgccgacgcctggaggacggacaagtgggcagtctgctcggcggtcatggctgctgtcgagtatagcttctgcgagcttgcgcgagaggggcggcagggtctcagggagttggtcgtcgagaggtcgactgcgggcccaaatcttggccggccatgctgccgaagctcgctcggaggggcggggcgtttcagccgacctcaacagctgctcgcccttcccatctcgtctaccacctctgaccggctagataggatcgctgaagaacgaacgcgcgtgccgctcaaaggcaccgctccaaccaggcccagtaccccgagtcgcgaaggccatcgtcgcctgtcgacggcaacgccgcttgccgccagccgggcttcctcgcgtcgctcatcaacattctcaaaggcggcacacaacgaaatgctgccgtttcacacgtacctactccgttcgcacttcgtccagaccaattgggacgaggacgccttcttctcgtcccttacgcggccgacaggcggtacgtcgaggacctgagctcgaccgcgcagcgcttcggctgacctgctccggctcgttaccccctcccagctgtcctcgacttccagatccccgaccgtctgagctttggctttggcaagacgacgacgcccgtgagcgcactatggctgtggggcatctcttgagcgcatgctgaccctgcatagcgatcgcctgcccctccagggcttcgcaaatgagctcgccggctcgctgctccctgtactgtcgggatcgctttcgtatcttgcgctttcgccgccgctgcatccaaggtcgacgccgccatccgccctcgaacagaccgacacgttccacctgcccgccccgccgaagccaccgcatacgagcgaggtttggctcggcggccgccgggtcgataagcagcccttcctcagctggggccgcgtcaccttgcccgagtggaaggtcgagggcgtaggctgccgccggctgtcgggccgcgtcatgggcctgatggcctttgtccactcgccgccagaaaagggcaagggcaagggtcgggacggactcgtgctgcaggttcagcactcgaacggccggtggggcggcgagtactcgtacagcgtgacggacggcctctttggcttccggacgctctgttcttttgcgccaccgccggatccagtcgatctcgagcagggcgaagagtctgacatgcagctccgcggccgcttctccgtcggcctcgaatcgtacatgtcgctcaagcagaagtcggccggtcgtgcgtgctcacctaagagccagcacacacgaaacccagactgacaaccctgcctcctcgacagtctcgctcgcaacgcgctatctcacaccggcctcgcccgacgcttcgaccccgccgagcatctcgacgctcctcttctcaccgctgatcggtcacatctcaacctcgtacttgtcgtcgctatcgccagccctcgcgctcggcacgcgctacgagttcaacgtctactcgtacgagtctgactggacgctcggcgccgagtggcaggtcggcgcgacgcccaaatctgccgatgagacggacgagcgcggcgtccttaaaggccgggcgtcgacgacgggggtgcgttcaatctcttgtgctcagcgcgtaagggccccccttactgacactctgctgcatacgacgcatcttgctccaggacgtcagcttgatgtacctgagcagggtcggcagcgtcgcgtacgagattggcgtccgggccgacctcagcaaccgcgtgacgccagtgcgcggcgtcgggctcgagttgaagtactgctcctagatgggtttacgacggaccggcgcgagagctcgggctgcaaagagctctcattccatctttgctatcggcaagcggaaaaaggggagtgtccagtatctgcagaggcaggttagcgttcggaagacggaagggctgctctgctgacgatgagggacctacttccggcgaacaccgttccagacctcctcgcggacctcgtccttgatcgggacgtcgtgccaatcacatgactcgagcccgacctcgcgcaggtggagcgccgagagctccgtgtacgtgtcgtgaaaggtcgggttggttgcgccgaggccgtggaagaaggagaagcgcgattcggggccggccagcagatttggcaggtgctggaagaaggccttgagctctgcaagcggcgagaaggaggcgtcgcgagtgatagcgacgatcagcgacgtgcacgggatggctgagcgacggtaggacgcaccgtcgtagccctccgagaaggtgtcgaagtagatgactaaaggaagacgaaggttcaagatcaactggcagcacctacatgcagtcagtagggaatgagagtagaagtacggtcgtagcctccctccttgtaaatctcttcgctctccatgaaggcctgccacttgcccttgagcaccatcaggttcggccgagcctcggtcgtccagcccgtctcgaccatgtgcgcgagcacgtccgggtgcggctcgatgaccgtgtgcaacagtggtgctggcgagaggttggcaaagagcgtgtcgacgataccgaggccgaagccgacgttcaggatccgcagcggctccttgccctctccgacgagaccctcggtcaggcgcgcgaccgttgcctccatgatctgcgcacgcacgggtcgaaaggaaaatcagcgcagccggcatactgagcttcgtatgcctcagacggaccccggtctcccagcccatcatgacgccgttgccctcctcgtcgatgacgcgggcctggccgttggcgtccgtctcgtacgttagcttggacttgagaaagaggtcggtgttgccggcgagcgtgtcttcttcggcgtctttcaagacgagcgtcgagccgtcctcgtccgaccgatcgcccatgaatgacaggagaaactcggtccggacgccgtgcgaggtgatcaggccgtagattcgcggcgcattcagcgagagggcgatgcaggctgccgtgttgccttggttgtcaaccgcattccagacagcgcccttggcgagcaggaccttgaccatcgcagcgtcctctcgctcggccgcatagtggagggccgaccagccgagctcgtcctgaaaccataccggcgcgtcctcctccttcagcagccggccgacctcggccgcgtccaggttggcggcggcgttgatcagcgtcaggcctgcgtcgaggagctcctcatcgatcgtcggcaccgaagcggccgacggcgtgtcggtggcagacattggtcttcgtgtgtgtgtgttgtggagggctggccgcagggggtgcgtaggttgtcgttcggagggagcgccgtcgtcgaattctgggcgaagtcgggagccggcagccggacgaggcgtcggctcgtccgcaagcctctctcaaacctcccaccctgctcagctccgaggggcagaacaattgcgagctctgcatctccgatgtcgcacgacgaagagttccacggccgggagctgcgacggctcgagcagaaggcggccaaggcgctgttgcctgcgccgcctgcctttgacgagctcgctgccttccgaatgaaactcgaggcccgacctgcagcacgagtcgtcaaggaggttcgcgatgtcttccgtggcgccttgttcagacagtcggacaaacgtctggaggacctcgtcgccggtgagtctgcggtcctcaccctggcgccggcttcccctgctcactcctgaacgtctacgctcgccgctgccgccgtctttgcagtcgacctgcccgacctgaatctgggccagcgttcagaaggagcgactgtcctcgtgcgcatcatacgctccccatactctctgtcggacccgctttacacgaccgtcacgcttcctgtcgcgtcatcgtccggccggtgcacgcttctccggcttcgctgctacccggtcctccctgcctcgcttggtcgcccgacagaggccgacgtcgaggacgtcttccccgaaggttcgatcctcgctgtcaaggagccgcgtcttgaccgggatctcctctctgacgaggtcggcatcgacgtctactcgccggctgacgttcaagcgctcgtcgccggggaccgcctcctcgaaggcgtccagtgggagggcgagggaggtgctgcctgggaggtgccaccaatagagcagctgtcgctggctgagtggacgaacagaggtgacgaggtacgtcctcagacccttcgcccacagcctgtagccttccgacctgacgagttaacgaccacctaaaggctgtcgtatcgtctcgctaccgggaagcgctgcgctgcttcacgctcggcatttcacagcactcggacgaacccgaagcgtcgcacacgtaccgacgccgggcagccgtcaacttgacgcttgaacggtactcgagtgcactcggcgacgcgcagaaggttctcgacgccgagtccgacacgaacgaggcactcgagatcaaggcccgggcgctttacctccttcgacgctggtcgcgcgccttggccgcctaccagaagcttcgcgactgttcggcagcttctccagcagcctcagctggtatcgacgcctgcgaggcccggctgcgtgaggccgagaccggggtctatgacatcccggccctctttcgcacgtcactcgcaggccccgagggaggcgtcgcgttgataatcgacgtcgccgactacgttggtccggtcaagatcggtccgtcgccgacgaccggcggcggtcgcgggctcgtgacgacgcgtgacgtacggcctggagaggtcttgctcgccgtccgagcagtagcagcagccagcgcgtccgacctgccaacgtcgccgagactggtagtctacaacctggaccagaacatcgtcgacatgtcgacgtccctcgcttacgtccagaacgtcctttggcggctcaaagaccagcccgagctcggccccaagatctataatctctacctcggcgacgatgagcagacgccggccgatttcccgcttgctgcgtcaacagaggctataaaggaggccactccgctcgactcgaaggccgtcttcaaggccagcttctggaacgcttcgttcccgcacagagtgctatcggtgcccgacctacgtggcgacgtgatcgcctaccaggacgacgccgcacccggagcgctcttctcggagtcggccatgatcaatcactcgtgcgcctggacggtctcacacgtacgtctcctcgtccgacctgctcagcctccctctcgctgacttacctctcgcccctctcgcagaccttctttggggactttcagatcactcgtgccaaccagtttatcccggccggggccgaggtatttgcgtcgtacgtgccggacctcccgctcgccttccgacagccgcggctggccaagttctttggcgtttgccaatgcagcctctgccaggaggacacgcgcgacccgggcgtccgcgagcgggccgacaaggttatccgcatcatccgcgagacctctgacgacgagacgacgttcgccgacatcaaagcattcgacgctacgagcaactcgcagctcgccgccgtcgtcaagcgccggaccgagatggcgcgcgagctcgatgcgacgtacggcgccgaccgagagatggcccgggtcgacctcttcttcggctgggaggcgcttcgcgcccccctgagggcgatcgccgagcgcaaggccaaggaaaaggagtacctcgcttggggccgcaacgaggtccgggcgctcgtcgcgctcggcgttgattttacgaccgaatcagtcatgggcctcgcgactccgacccggttcgaggcgacgccgaccgcgctcgacggcagcctgccgatcaggacgccgccaccgttccgaccggtcgaggccgctcggtctctcgtcctgctcgcgtccatctcggggcggatcgccaacctgcccgttacgacggccgaggctaccgcgacgtgggccgccgcctgccgggcatggctccgagcggccgcctgggtcgagcacctctacatcggcggcgggcgcgagatgtttgccgagcgctggcaggctgtcctcgcctttgagggcctcaccgacaccctggcagacgttgacgatctgtgatgaagatatccgtcaagtcgcaggtcgtcgtcggccaggcaggccggatgaggggacccccgacgaagaagcgtctatagccgcgccggcggctcgtcgaaggaggtcggaaggcattgaaagcagactctgcgagaccggtggcagaaggtcagccagcccaaacctttgagctccaattgtctccgctgctgggcctggcgacagaggtcgactggcgtgttgagcggacgatcctgcctgtggctcgtcagggcgtcgtcggagggcgaggccgaaaggcgtgcgggcgcaaggcgggcctcctcagacccgagccctgtaacagcgaccttcagcctcgacccgtccctgtcttgcttctcctgtccctcgtttctctctcgttctcgcgaagatggccgcccctacccctgccggacagaagaagcgtacgtctgactccgtcaccaccttgttgctgcgtgcctcagagggcacgacgccagcccggaggagagcgatgggcgaccgtccgtccctcccggcgggtttttgcccggtccaggattggtgcagggcgacgggtcctagcagaagcggcaaggatgagagacgaccgagaacgcgtctggctaggaaggacgagcgctgaccttgctacctctgctcttcctcttcagccctgccctgtgagtgccgtcaggcggctcggccgtttatccgacggctcaagccgacggctcacgtcgaccacgcgccgccctccttctctactgaccgccgttggcttgcttcctgactcgtctgcccagtctatgtcaacttttcggccggagcaatcgccggcgtgacggagctctgcctgctcttcccgctcgacacggtcaagacgcgccagcagctgtctaagggcaagcaggtcgggatggtcacgatgttcaaggaaattgtcgccgctgaggggtgcgtccttccgccgaacccgccagcttctagcacgagtagccggtcatcggaccggcgcgctgcatatcgctcgtgctgcggtgaacgacgctacggaaggctcactgactcgcgtctccctcccccgcgcacctatcagtgtcggtcgtctctaccgtggcatcatcccgccgctcatgctcgaggccccgaagcgtgccatcaagtgtgagtgatctccaagtttgaccgagctcttcaggctgaagagttgacctttggcccgagcggctcgcccgcagtcgccgcaaacgacgcctggggcaagacgtacacgaacggcggcacgatcccgatgacgcagggcgtctcgatcctgacgggtatgtcggccggtgcgaccgagtcgatcattgtcaccccgttcgagggcgtcaagatccggctccaggaccctaaggccaactacaacggctcgatcgacgtcatcaagaaggtgctcgcctcgtccggccccctcggcctctaccgcggcatggaggccaccttctggcggcacgtcctctggaacggcggctacttcggctgcatccactcggtccggacaatgatgcccaaggccgagtcgaaaggcgagacgctccgcaacaacttcattgccggttcgatcggtggctttgtcggaacgacgctcaacacgccggccgacgtctacaagtcgcgcgcccaggctctgccggcgaacgagcgcatcggctggactgtcgtcgagctcgccaagattgtcaagaacgagggcgtcggcgcgctctacaagggcttcacgcccaaggtcctccggctcgcgcccggcggtggcgtccttcttctcgttgtcgaccaggtcctgacgacctgggccaagttcctcggcccgccttacgtctagatggcacccagaccgtctctgctgtagcttccccttcgcatctccccctgtagatctcgtctttgggttccgggcggatagagcgaccggccgggtcgtcgcacacaccctcctttcctcgtgcgactcttggtgtactcgttcgtgtatcgcatcgcttccttcttctcaaggactttgttaagaaaggggggagaggcaaagagcgcaagggtcactggggtatcgattctattggacggggaatgagcgaggcacggaagagggaggccgagaaccaaaaagggggaggaacagggtagacaaaaggcgggggggtcgtagatcgggtcggttgactggaatctcagaagcactgtttggccgagtcgctgtcagcgaacaatgcgaagggtggcgtaggagactgaaggacgtacgttgaatttgctcttgcggctctgcattgcctcgaggcgttcctcgaggtcgcgcttggcgttctcacgctggcgcatctcggatgccatcttctcctcgagctgacggctgtcgttgtccgcactcgacttgaccgagaggacctcggcccgcgcgtgctggaggagcgagcgcagcgtctcgcattcggacgacgcccggtcgcgctccttcgcgatgtcgttggccgagaggcgggctttgcgcaacgcgcgctccgagtcgttaagcgcggcctcgagcgtgttgacgaggtcgatatttgcctggaggtcggcctcgcagtgctgcagtcgcttgttcaggtttctgacattctcgcgctggtcgtcgagctgagcgagcaacctcggatccgggcccggcggcggcgctgggaacgcgctcccatcgatcgaatttgaggagcgtggcgagcggcgacccgaggtcgacgacaccgagttagtccggatcgtctgaacctgagagtgaggacgcgatgtcaagctttctgcgtcggcatagcccgggaatgacaacggcaaaggggggggcggcatgttgggcggcggggtcggcggcggcggcttgctccgcccgaggggcgatgccgagcgaccgatgttgacgctcagtgggcgctgtttgccgtcgttcaggaactcggacgattcgttcgtcggcgaggtcgtgtagtccgacatccgccgctgaagctcgcgcatggcctcctcctgccgggttcggtcgacatgaagcgctttaagttcggccttggacacttgaagctcctgctggaccatcgagagtgtcgaccggtgcgagtcgagctcgcccagtaccgacgcatgtgacgccgctacctgctgcagctgctgctgctcagctcgcgaccgggctacctcggcctggagagcgtcgatctcctcgagtagacccttggcctcggtgtcgcggtcggtgagcgtgctctcaagctctgcgatcttcgccgccgactggtcgaggctcgccttgagctcgtccgctcgagtctcagagagcgcccgcagctcggcatgttccttctgtagtgagccgtgacgagtggcgaactcgtcggcggacgattgggcggatgagcgctcgaacacggcggcgtctgaggcagactgcaacacgatcggaaggcgacggcgatcagtaaagagagacgacaacagaggacaggtgcgacaaagaccgaccttttgagcagcggcggtcgcgagcaacgactccatctcgccgacgggcacactgcgcgaagcacctccggagccggcggccgcggttcctgccgttgcgcgtgcgagctcttgggcgtgctcctccttggccgtcgcgagctggcctagagcgtcttcggcggcgataacggcgctagagagaagctcctcgagcttatcgagagcattctcgtggtccgcttggttctggatcaggattgcgcgatggccctcctcggcagcggcgaccttctgttcggcctcggtccggaccagttgcagcgcagcaacgtgctcctcgcggctcttgctgagcgccgctcgcagccgctcggtttcctcggccttctcgttcgacaggcgagtgatcgctgcggcatggtccgcgcggacgcgttcgagtgtggccgagtgatcggcctcccggctctcgaaagacctggcgtgctcaatctggacgcgtccgagatcagagacgagctcagcctcgcgtttggccagccgatcggtgtgctgctgatggagcgttgcaatcgcagccgcgtgcccttcttgcgactccgagagggttccgtcgcgctcgagctcggcgcgtttcaggtcatcggtgtgcgagtcttgcagccgcacgagatccgcggcgaaagaggtagcctgcgacgtcaaggccgcctcatgctcggagcgggatcggtcggccgaggtctgatgctcggctagcaaccgagcgcgagagtctgcggcatcccgctctcggccgccgaaggctttgagctggccgacaagatcctcgttcctgtcatccgaaagcgcgaggctgttgcgcaggccgtcaagttcagcagacacgttgagcgcctgctcagtcgaggaccagcgtcagcagatggcggctgaaaaggggacagcagacgcacctggtcccgcgagagcgcgagcatatcaccgtggctccgcttcgacttggcaagctcggcggtcatcgcctcaaccgtctcgcgatgggacgtctccatacgggccatcgacctgacgacgggtcggaatcagcatcgacgtaggcggaccccgggattgcgggcacgactcacttgagcaagtcgtccatgcgccggttctggacttgctcgtccgtcacagtcgagggctggtgggatgaggctcttgaaacggaccgcttgtctttgccaccggctacggtgagtgacttggcgtcgtgcgcagcgtccgagcgaagactggcggacgacgccttgtgggggagggcgagcttgagcgccccttcgaggtgatcgatctcgtcctcacgctgcttgagaacctgtgcgataggagagcgtcgacgaattagcggtcagtcgagcgggtgggacaccgcggcggacttactttctgcaggctcatgatctcatcctcgagcgactggatcgatcgctcgggttgcggggagagactaaggctgcgtaccggggaggtggccaggagtgttgcccccgacccgccccaggaggaacgagaggagggcaacgaggaagactgggcggcgaagcagagcgacgagtcagcagagcctaggtggcaatcaaaggacgccgacgcacctcctgcgaaagtgatgatggcctgaaatgagggacggggaaatgtcagcttcaaagccgaagagggaaggataaacaagaactgcggacatctgactgagatgcccacctccccgcccaccaaaaccctggccgtttggcagggtcgtggttttggcggcggtcgagctgccgctctggaaagagctgcggccgaagctgttgcgttggcggaccgaggtcggcgagcctgcggctgaggccagactgccccgtgagcccgaccgagggatgacgccggactgatccgtcggagacaccgatcggtcgcgactcgacgaacgcggcggctgctcgcgcccctgcagctcggcagacagctctgcgatctccttcagagcgtcacggtacttggccgagacctcgtcgagctcggtcagcgtcctcgtgtgggtcatctgcaggtcgcgcagctgttgttcgagttggtcctgcgagacgtctgccgacgactcttgggcgaggatcggggtccggctcgttggcgtctcgtcgtcgaaggcctggttggcggcgtcctccgacagctcaccggctggcgtgtggtaggccgagtcatccgtcgagctctggcgtgatgccggtaccagcggaggcgcgaggcggccgttgctggcgccctctcgagtacgctggatgagagtcttgagcgagaagcgctccgactcgtccttagccgcccgcgcctgtagcgttgctcgctcgcgaccgacggcctccatgctgcgtaaagcgtcttcgagctgccgctcgagaccggcaactttgcggtccttcacgtcgagctcgtgcaggagttgcttgttctcctccgtggtgccgatcgcgttgagcctggcctcgaggtcgcggtacatcgcctctcgccgaacgacctccttctcgagccggtcgaccttggtcgcaaggccggtcgacgtcgaatcggacgtcgccagctgggcctcgagctcggccaggtacttggttgacgagccgtctgactccttgagctgcgcgacttccttgcggaggctggtgacgtgcacaccccgggtgtcgtcgcgctcgttgagcgtgctcagcttggtctcgaggtcgcgaatatacgtctcgttcgacgcctcgcgctcgacgagcttgccgatccgcgatcgcagctccgcgttgtacgtctcggccttggcgttccggctgagggcctcggcaaggtggatctcctgctcgttatagaggtcgttcgtgtgcgcctggccagtcaaagcaccggcgaatacgtcagacaaggcatgagagggagaacacctccgaggagagcaacgtacgagcgcggcccgcgacaacttgagctcctcttccatctgggcgatggccttctcgtactcctcgatgaccggctggaccatgacggcaaagttggtggagccgccgtcacggccgtgcgacttggcctcctcgacctggcgcgtcagacgggcgacctcgatcatcgtctcgcggtaacggtcgctcagggcagcatgctcgtgctggagatcggagaattggctgttgagccggttcatggcgaccgagcctggccgctcttcagatatgacctggaggtcgttgccgccggccgtcgcggaggtgctcgccgacaagccgacctgagctgccgcggccttgagggcggcgtgctccttgcgcagcttgacgagcgtcgtctggaggtgctcaatgtcgtcccagccgacctccatctggttgacctctgctcggttcttgatgttgcgcgcgcgattggcgtacttaatcgtgctcaatgtctcagtcaggttgaactcgctgaggtcgagaaacgggcgcgagtcagcggcggctatcggtgcaggcaacagcgacgaaggacgactcacgcaggcgagacacaggcaatcattagcgtatgagcgttgccgccgagcgagtcttgtaagagccgcgtaagctttgagtcgcggtacgggatgtgtgctgcgaagaagagcagcggcgcgtcagctgcaaagtctgcgaggtcaaggccaaatccggtcgcacttatggtccgcgccttggctggatcgccgagggccgagatgacgttgccgagggcaagcaggccagagttgatcgagatgccctccttcatccgctcgccagcggctgacgtgcgcttgagctgaggacgaaggtcagtgcaggtcagcgcccggtcgcctgttagaggagggcaggccgaggacgcacacgctcactgccagccaggtcgacgaagtggaatttgctggtgacggtcacccactcgccgccctggttcctaccgggagacgcatcgtcgtcgtcgacaagcggacttgtcgctcgcggcgtgccgactgtgctcgtcggccggaggcccgaggaggtccgctggtgcaggaaaggaaggcctgacggcgtcgttggccgcgagttgggcgtcggcgacattgtccgggcattggcagcgttggcaaaggcggtcgacgacggccgtggaattccgcgagagggcgtgcttggcgccgacggattgacaaacgcgctcggcggtgcatttgaggaggaggaggacgcgctcacgttcgacgaggggacgacagaggtcgcgccgctactactgctgccaatgcgcttacgctgcgtgagcgtgatggagaagatggcatgtgagcgcgacgactgggcgttcatgtcggtctcgttcgtccggcggaggacgctgccctgctggaggttgcgcatgacgtcctccttcgagttgacctttgtctctcgcagaccggaccagatgatcttgccgtccttgtcctcccggatggagaccgtcggccgctccgagacgggcgtggatgggtcgggattcgacagaaggtcgagcaggtcctgcgcaggcaaggcgatcaagaggagagttcagctccgtttctctgagatccctgcctgatttatagccggatgcgtacctcgttgtacagctcgacgaacgagttggtcatctcgcaccggatattgccccgtccgccggcctggcgctccatctcggcgcacttggcaaagatgtcggtcaccgcgcgcgggacgaggccagtcgacggcaaaatctcgcgctcgtcgttcgcgccggcctcgagtgcggtgcccatcgagtacgacttgcctgacgacgtctggccgtagctgctcggatagggtggcgcacgagttgcctgtcagcgtgcgagtgctaactgcccgagcctggccagagatcagggacgcacgcgaggatcgttacgttgaagccttgaatgaacttgtcgacgagcttgcttgcggccgcctcgtagaggtcgcgctggccctcgtctgggccgagcacgcggtcatagtgaaagttaagcatctggctgcgccggccgctgacggagccggcggctgtgcctgccgaggagcccgcatcgaccgagacggtcgtcgaagatgctggcgtgagcgacagccgctggaaacggggcggaatggacgccaggtcgtgcgcgttcatcggtcggatccggaggactgggcgagccgagcggcgaggtcggagagcagctgggatcagccaacagagcccagagccctctgcatcagactcaagctctccgactggatgcctcggaccagaagactgcatgttggctggaaggagggcccgcctcgcacaagaggcatcgcgagcggtgcccacccgcaagagaccggcttcccttccctctacgatcttctcagcgagcacggccagagatgcccgactcaccgacttggacgttgccgtcggtcgaattgctcggtccttgcccagcaggtgggtggtccccgccgccggtcgacgagctcgccgagctagactggcgtcggtgggacatccgcggacgaggttgcgggtccgaggggcaatccgagctctcagagaagagggacggtggtggtgaaaggggtaggcgagattggccgatgccttggtctggctgatagcagtcgtccgaggttgggtagcaatggatgcgccgacagtagctcgatgagagccaggagagacggagagagcttgatgagtcggccggctcggctgacgacagcgagggaaggcggcgcgcggtcggtcgatgcggagggaggggaaggaggtcgtcggaagccgacgctggcaggctggtcggagagggctaggtccgtagcaagcgagcgactcgtcgcagaggagtgtcggttgtgcggccggcgcgcttctacgctcaacaacaggctaagggcgccagaggtacgggtcgtgggcggcgggaagtgaggggcgccgctttccttgtcaagagcggtagagttcagggcggccgcctttctggctcggccggcccggcaccactcgccgtcggccgttccacttcgcctgtcctggccctcagagtggcaacggcgacgagctcggcgcgcatcgcgatgcccaatgcgcaaagcagtcatcgagggcactcatccgaccttccccccgactcctccgcgacccacaaactcccccgccggcccgacccgacccgaacctcgacaagctcccagatccgagccttgacgtcgtcgactgagccgccagcgtcgacctcgacccagctggctgaaccgtgtgtcgcgttgagtgcggcgccgacgatgtcgaacttggcgcggacgagcgtctgaaacgcttcgagctcgtatctgcaggacgttgaaagggaacgctcgtcagcgcccaatcccgcagcagtctgctcgcgatgagaggttgcagttgggccaggactgaccgctcctctccgtagccgcctcgccgagcggcctcctgcgcgctcagcgtcaagaagagcgttacgtccggcagcggcaggccggtgtctggcgtctggaggaagcgttgatcgagaccctggagcggaggacgcattagcgactgaaagagctcgattgtagcggggactgcatgcacctttgccatcgagaaggcgaggcccgaaaaggcgtagcggtcgcagacaacgctcgtacctgcggcgagcagcgcctcaatctcagcccttcgaggaaggacggcgtcagggtcagccctcgtttcgctacgttctgaggtcggatggcattgctgtcgacgacgcacgcgcactcccagcggttggccgagaagagcaggtggacggccttgccggagcggtcgccgagctcgacctcctttcgcaggtagcgatcgagcaggatcccggtcggtctcgtccgttctgacacaggccggcagcacagtcagatctcgacaattcgctcgtctcggatcgacaatgggcttaccggggaacttccacggttgggcggcgcaggtcgcctgctcgaggcgctggagcaggagctcgcactgggtcgacttgcccgaccggtcgaggccttcaagcacgacaaagagcccacgttggctgagcggtgaggaaggagtcatgcgcggtcttttgacgacgatgcgaaggggtactgagagcgatgggagatgcagagacgagcgagggtcggacgcatcggttcaggtcgcgtcctctcgctctccgcctggcctcgctgctgctgcgcgggggggttgtcgcgaggccgctggacgacgccctagtccggccagtctcccgcgcaaggacttggtagctgaacatcctcactggcgatgctggcgacgcctgccagcccgacttccacttgcggcatcgtcgtggcatgcaacatgcagaaggcgagtctgtcgtcgccgtcgaggcccgagccaaagtcggcagcaaattcggactcgcgcgcacttcggtcgctctccgcctgctggcccgccgcaccgaccgttcctcaacctgtcccctgttcgaccttcccggcacccttgctcgcccttccactcgcgcaatcccactcgcccagctgcgataagctctaagtcatggtccgtaggctgctccgacagccgcctgaccctgcattgaggtcaagactgacatctgctgcggatgcccgccccgtcgcgctctcgcttgacttgcacaagcccaagtgcgtcgcgtgcctctccgaggtcgtcgagatcgactcgacccagggccagacctactgcggtggatgcggtatcgtcctcgaggagaacacgattgtctctgaggtcgcctttggcgagtcggcctcgggagccgccgtcgccatgggctccttcgtcggcgccggcgctcgtctgtcccccgcctcttccctgtcttgcctgctcttcagggcgacggctctgactgacataacgagctgcctggttcctcgcccttctcagtccgtgcccgcgtcaatggcccgcatggcaaccgcggatcgcacgaaagccgagagttgacgcttcaggagggtgcgtcgtcctgccgccccgcccggaccttgcgtcgcgcgcacctccagtcaacttcggttgctgatggcttcatcccttcctcgctcgcatccaggccagcgtcgtatcaagcaggttgccctcgggctcaagctttcggagcgcctgtgcgactcagccggccgatggttcaacctcgccgtctcgcacaacttccacaagggccgcaagtcgggttacgtgattgcgtcgtgcctctacatcacgtgccgaatggagaagacgcaccacatgctcatcgacttcagcgacatgctccaggtgcgtcttccagaacgacccttactgctgctcccggaccaaacgctggcgctgacgctgagaccacctgaccgcgcaggtcaacgtcttcacgctcggctcgacctacctcaaactcgtcaagacgctcaacctccagctgccggtcatggacccttcgctctatatctcgcgctttgcagcgctgctcgagttccaggacgagacgcagaaggtcgcgcacgacgcgacgcggctcgtccagcgtttctcgcgcgactggatggacacaggccgccggccggctggcatctgcggcgcgtgccttcttctcgcggcgcggatgaacaacttccggcggtcggtcgaggagattgtccaggtcgtcaagattgccgacacgacgctcaagaagcggctcgacgagttcaaggcgacggcatcgggcgggctcagcatcaccgagttccggagcatgtggctcgaggagacgcatgacccgccggcctacacgacgagcgtccgcaaaataaagcggtccacgtcggagctgctcgacgacgacgccgaccgggccgagacgtcgtcccagggcgccgagcgcagtcggtcccgctcgcgttcgacctcagccgcgccagctagcagccgcaaggggagggacaagggcaagggcagggaggtcacgtcactcgacccgctccccgaagagggtacgcccggcccgctcagcctgaggccggccgctagcggcgacgctgacggcgcggccgtcttccagacggcagccgactttgacgacggcgctggcgcgctcgccgacgagggcgagagcatgatcgatccgtcgctcatcggatcgccggccggcggtagaaatgccacactgccggcatcctcctctgtcgctggctcgacttggggcggggaggaggctgccgacgaggccgctgagaaggacggccaggaaaaggccgagcgcgagaaggacgagaccgacagcctcgacggcaaacggggtgagaaaggcgacggtgccgctgacgcggccatcacgggcgagctcgacacgtacctctcgtcgacgcaggcccagttgctgtcgaccgagctgaccgaggccgagcggcggcgagaggagcgtcgacagatggcgacaggcgacctcgacgaccttgacgatgccgagctcgacggcttcctcttgaccgaagaggaggtccaggtcaagacgcgcgtctggatggagtacaacaaggactacctcgagaagctcgcacgtgcgtcatcacacacccctttccgctcggctcatccgtctgctgacggccttcttcctttgacctaccccgactggctgcagtccgggaggccaaggcgcacggcgaggccggcaacgggccaaagaagacacgcaagaagcggccaaacgccaaccctcgcggggcgacgccggccgagtcggccaagaacctcgtccagaagaagttttcgcgcaagattaactacgacgcctttgacaagctctttgagccgacagacgtgccgcagcggatgtcgcgctctcagctccgggacagcgagggtccgaacggctacaactcggatgacgtggccgaggacggcaaggagaaggccgaccgtgagtcgtgctgccttcgcagagctcggccgagacgctgactcgtaccgtacccctccctgtgcaggtaacgaggacgatgacgaagagctcctaccggtcatcgaagagaacagcgatgacgaggttcgtcaccctccctctcgtggccgtctgcttctaagcttgctgaccagaagacgtccctaaccctgcaggtcgggcaaagctcgtccaggaagcggccgcgggccgaagacgactccgacgacgagcgtggagcgactcgctcgcggaagagcggcgacgataccgacctccggacacttatcggcggcggcggtgactcggacgacgaggcctccgacgtctcccaggagttcgactgagccgacgaatcccgctccggtcggccgtccatctcatgatcatgattcaactttacactcggctctgtgtctcatcgctagcatgtccgcagatcaaaaatcgccggacgacagggcgcgtacgacggggccgacgtcaaagttgaaggaggtcgcagcgcgggaaggaccgtcggcgggcgagcgcggcgttgggctgctgtggttgccagggccggtcgaaacgccgcctcgtcggccttcctccagccacatcctcccaatcttgtcccgttcaagcacactatggcacccagttcgtcctgccgaggcgcgactcgcagcgacccgccgtgacaacgggaagctcggattagcattgacgcttgcctgccttctcggtcgcccccggccattccttccctccgcatcagaggcaacccccggcaccccctcgcgctcctcctcgcgccgcgtctcagccgctgcctctatagccgctccgaaggccaaggccgccccggcgcccaaaaaggcgagagtgtcgaccgccggcgcgttcaaggcgtccgctgccgccgtcgccccctcggacgagctcctcgaggtcgaggccggcgagtcgtcgacacctgccgtctcggccaaggacgctgtcaacggccttgcccaggcggctggcctcaagcgtaagcggcccatcggccgaccccggcagagcatcgccaaggcccagaaggagcgcctcaaccaggtcccgaagccaccctgtgagcgccttcagagccggccgactgccgctctcgctgtgcctcatgctgacgacgagctcgtgcaccggttccccgcccgctagcccatgatggccctgctcagtctctcttcatctttggcacaggcgacatggcagcttttggcctcgggcccgacgagctgggcgagatcgcccgtcctcggctccacaagtgtgcgtccgacgactggcagctggaggcatcgttcgacggacgacgggagcccgcaaagcgctgaccatgttggcggaatcacagggttccaggagggcatcgaggagggcaagtttggcgcgcccgggcggggcattgaacgcgcggtcgctggcggcatgcactcgctcgtcattgacgaggccggcaaggtcagaccggtcatcttctctgtctgcggctgccacactcctcccgctgtcagctgaacatctgaacccgcccacctgtcgctgcaggtctggtcgtggggcgtcaacgaccacgccgcgctcggccggctgacggccaacgtgcctgaccccgagaacccgggccagaagatcgacagcgaggagctcgagagctggccgatggcggtcgccgcgcttgaagaggaggagttccgtgccgttaaggcgatcgcgggcgacagcatcagcatcgtcgtcggagaggagggcgacgtcagagcttggggatcgttccgtgtacgtcgttactcgcggtcgagattgctctcggaagcagcgctgacgagacgatcctccatgtgaatcccagtcggcagagggtctcctgggctttgacggctcgcccaactcgtctaagactcagtttaagccgatcccgctgccgtcgctcgcccagcataggttcgctgcggtcgcctgcggcacggaccacgtcctcgccctgacggtcgatggaaccgtctttgtctggggcaacggccagcaaaatcagctcggccggcgtattatcgagcggcgcaagctcaacggcctgtcgccggagcggctcgccctgcgcaacattgtcactatcggcgccggtcactaccactcgtttgctgtcgacaaggacggccgcgtctacgcctggggcctcaactcgctccatcaaactggtgtcagcgaggaccgtggcggcagcgaggacatcgtccaagtcccgacccttgttgacgcgctcgacccttcgctccacaacggcgccaaggtcgtctccatctcgggcggcgagcaccactcgctcttcctcttcgacgacggcaccgtctgggcctgcggtcgcgccgatgcctctcagctcggcctcggtcccgagcaccgggccatgaaggatctcaaggagcgtgccgacgaggagcgccaggccctcctcgacgccaagaaggagaaggcggtcaaggcggccgcggaggctggcgaggacgcgaacatggacgagatcgcccagtacgaggcaccgcctgctgtcgacgagtttgtgcccgagcccgtgcaggtacgtgcggtcattggctagacgctggcctcaaagatagttgctacccggtcggatgaaggctgacaccgctcgtgcccttcctcaataggtctttttcccgcccaagccaacggccgacagcccggcacccgatttcgcaccctacccgacctcggccgaggactacacgcctcacgccatggtctccatctcggccggcacccggcacaacctcgcggtctcggccgatggcaacgtctatgcctggggctacggcagtgcgtcttctgccgggcggtcagccgccgatagcggcgcacgcttacctcgccctttcccgtctaccagaccagtgccagcttggcctcgggcccgacctcgagacggcggaggtgccaatgcgcgtccggagcaaggtccgtctagctgcctcttgtttatcatctctcgcaccgaggccagctctgacgccggccatgtttccctgcctctgccagtcgcttaacgactacaaggtcgtcgatgcttccgctggagggtgagtctgactttgagccaacgccgacgccgacgagtcgctgatggctctcctcttgcgaccgccagcctgcactgcattcttgttgccgtgccgaaggacgcttgagcgcgtgtccccgcagattccatcccgagcaccccttgtctaccattccgatgtgtgtcgttcgcccaaacttgatcgatgggaagcagggttcaaatggtgcgaggggccatgatcatgagctgaggggcaggggtgtgagtgggatgggtgagaaagcaagtatggaaggaaatagaagcgtcgtcgagatgcaatgagaggcggtccgacactggccgcctgcctcgcgaggcataaaggtcagcccagagggctgagatctgaggaagcggtgaactcggctggatcgctgggtgtcttagatgttttcatgggcgaggtgtggactggacgaacggcgagacggcagtcagcctgctgaaggcagaatcccggcacaaggcgacgcccaaggcgacactcacgaattttccggttccgcagatacgcgatggcgacgtcgtaggtctccaattctgaaaggggacctgatgaagagccaagcgatcagcagccatgcgaagagggagcggagggtgctcggtaacggaccagggtcctcgaccatacggtcccaaagcagttgatcctcgcgcagaagcgatcgaaagtggccaggctgcgacttgccggcagcattgaggaccagctcgcccgactcgtccgtcagatgatctgcgtcgtgcgcgtaacggaggaggtcgagcctaagcgtgttgatcgtgtggatgtggtcgatgcggatctggttcttcttttcgtaggtgcgcagccacgtgctgagacaggacacaaaggcatggtcagcaaggcaggttgtaacggtggagcggcgagggaaggttcgagagagggacagacttggcctcgtccaccagctcctgcaactcgcggcccgccatgagcgctccgtcaatgatccgatgggcagcctgggcggcgtggagagcgcggatagctttgagcctctcctcgtcctgctccagctgaagctgctcctggtcgaccggtcgtgtcagggccgcgagcttcttgcgctctcgccgctcagccttttcgacagccgcctgcgcctcactgcgaacgaagtgctcggtctcgacctcgagctcttgagcccattcggacggcaggaacgaggtcgactcgacgaaggttgggcggaccatgtggaccttgctcttcaacttcttcgagaagcgagcagctcggccatatgacgccgtcaaccctgggccctccgcacccgcacccttcgaagcggcctttttcttcttctgcggcttattgaggtcggccgtctccagtgattgttgcttcgaggccgccacggaaggtgcctctccggaagacgctggggaagtggtcgctcggtcgttcgaatggaccgcagtcgccgacgccgtgccgactgctagggctggctcgacggcagagccgcgaagactcgacggtccagcgatggctgcgtccgtactcgaagtcgaaagaacgctaggcggagcagccgctgatgccgtcgacgagctcgctcgcgagctctgctccaagggcaagcggacgaggtcggcccaacggctggccaagggcgaagacgaggcgagcgaggccggccggacgagctgcttggccagggcaacagagcgccgtagggtggccatgtgcgcgcagggataagcgcgaaggagagagcgaagccaagaagcagcagagaggagccggtcggaggaggcctgagaggcccaaatgcgaagaggcatcaggtcaggggccaggcgacggcgcgacgacgggacggcagaggccgggctgtggtgtgacgtaccctgcggggcggtcgtcaagccgcaagaggccgagcagggttctcgtttgctctctcggacaggcccggctgggagagcgtgtagagaagggaataaatgaggaagtctggtcgctgtcggcaggaggaaagtcggaaacgcgcgcagagcgagctcgtcgagggcccgaggcgagttggcagcgcaggcggaggacgtgcgcacacggcgcaggatagcgacagcactctcagagtcgagcgagagacatcaggtgcgtgttgcagactgacaagtcttgatactgcgctgagcgctgccagtgccgaccttcccgttgcttgctgccttcacaaggcaccggctgccctcagcggacaggctgtcaatctcatgaatgccgtggttggacagcagcgtaaagtgatgagcgccagacgccttgaattgtctccggccgcaagcggcatcgacgaaagggagtagtagatcccgatgcggcccgagtcagcgcgtgtcgaacacaatggaggcgagtggacgaggatgatcgaggcgcgatgccgtgcaagctcgatggcagcattacgctaccgtgcggtgcgacggctcggaccggccgaaagtgcacgaaccgagaacctgtccgcagcggcaggttagaaaggcgatgagtcctccgccgatatttcgcgtttggccgcccctctcgcggctgcgaggtccttgtactcctgcctaagctctgggaggaccgaataatgtgcagtcagtaatcctctctcagaattcagcgaggaggcgctcactacgacggtctgcggtcccagtcggggaggacgtcagcacaaacgccggacacaacccgaagcttcagtcataacgcacgctcttccacctcgtcaagctggtcgatggcctcctcgagcgtctcacagtcgtgcagaaagcctccctcaaaggtgatccgcttccagttgaaggcgaccgtcttgtagaaggcaggctcggcccgggctcgttcgatgaggtagccgcggatcgtgccgaccgcgagccggctgtcggtcctgggaggcaaggaggcgaacctcaagacggtcagcatgggactcggggcgggtagctgaagcatgcgacgcacccaagcctcttctgcatgacctcggcaatctggccggggaagtggcctgccttcaggagctcggctgcgaacgcaacacgtgtcgaccggtcgcgcctcgtgcggccgttgtggtcggatagaccgtacggctggtttgaatagagactcggccgggccgactgctgcttcggctcgcaggaggcctcgttcgggctgcttgagatagtggagggatccgaagagaggtagcggcggggcggcgagctccgagcttggtgaccggcgagcaggctggcccagcgctggctcgggccgcgagcaatcgctcggatcaacatggacgacggccggatcctcgaccagagcgtatgtatcgactagcggagggcgttgttggatggcgaggcaactgagtggcggtcggtggcgaggcagccgccggtcacgtcggagggttccaagctcgactgactgcgcaacagcccagccgacctttcctttggcctctcccgcccccgggcccgatgcgacgatccagtggcttgctactcagacaaggcagctttgatcgagtgacagttgggatcatgcagatcaagagaaggcgttctgcggcgcgagcagagtcaaagcaggacgctacagggatgacggtctcgtcgtcgggcgtggaaataatcctcttcacgagtctttcttcaagtacctggcgttgtatggtctcctggtgttgaacgatggtacatagccctgtgagtggacaggttgcgctgtcagccaattccggcaaagagagggcgaggagaatgctctcgcataccccgcgcgcgttgtctgcagaggtgagtgacggtcgacaggtccggcccgatgtcagctggagttctcgaccatagaggtgcaatgacctgagcgatcttactctcgcggaaacgctcccgctgctccaacgcagcctcgagcgacttgctagttttgtagacgcctgggtgttggtcgcaaggggttagcatccctctggaatgaaaggggcttcgccgctggccgtccccctctctggaggcgagcgagcgagacgcaccttcctcccaggtgaagcgctcccagttctcggtgagagattcggcaaagtccttgtcatgcttggccatgtccaagagatagccgcgaatcgtgctgatggcgaggggtttctccgtgctgtagttcgggagaggccggcggcgcgtgaaggggaacaggaaggcacagagcgacggtcagcaaaggcttcacgtcgacatatcgctcgatcgggctcctggtctccctctcgacacctctcgaccggaaagcctcttccagagcagaggacgtacccgagcgagccggcgatctggttgcagagctggccctcgttccagagctggacggccttcttcatccggtcctccttggccgccacgagtgcgacgtagtcgggcttgttcgcgctgtcctgactgaagtcgctgacactctgtgctcggtcgaccggcgccgccgccgcagaggcctgcttgttgcccggtggcgaaccgccggttgagctgccggcaggcatgtctgaccgctggcggatcgcgagcgagctcgcaagcggccgggtggcggtggcagtagcggtggcgagcagcgagcgggtgctgaggccggcggggaaggaacggaggaagaacatcttgaggggtcgtggtaaatggagaggcgaggaacgggcgcgaaaggggagcgttggtggcgaggcggagtcaatcactgcgggatgcgagagcgcagccggcagccgagccccggccatcctgcctcgaccagtcaagccactctttagtgcaagagtgccatgcgctgttccgaggtagtctgtatttggtcgctgaccgggccgagcgcgagacgaaatttcctggccgccaaccgactcgcacgcgcccgcgcgcagacacacaaagtcgggcaggaaggggctacatgtgatcgagacaggatgggccaaattggctacaagaggaggacgagccgggagagcatgcagagccgacgcctactcgcccttgataccgttctcggacttgctcttctggctccaatccggggcctcgtcggttccgtcgtcctcgtgcttgtcggcctcctccttggtcttgtggacggtcgtcgggttgtgctcggccggggcgtagactagaagttcatgcgacagagtaggagggtcagtcgcgccattcgtacggtcgacagcgaggcgctcgcgggaaaggttgagccggagaggacgtaccagtctggaggatgagcggcgtctcgcccgtgttgacgaactggtgcttcgagccagcgttgacgatgacgcagtcaccggcctggtcaagagaggtgaagatcgagaggacgtcaggatcgagggctgctcgaaaagagaccggcagagtgacgcaccttgatgtcgcgggtctcgccgtcgacgatcgcctggccgacgccgctggtgaacgtcaggatctggtcgacctgggaggaaaaaaaaaacgaaggagaatcagctcgagcccagcggcaagacgaatgcgacggagaagatgggaggcaccgtgtgaatctgaggtgaaaggtggtgtaagattcgaaggtcagtcctggcgcatatctggagcatcaacgtattggaataaagcgcgcacctcctctccgatgtcacccttgggcgggatggtcattaggacaacttggtgatacagacccgtgtgcaagacggtgcgaaagttgttcgttcgactcgggagatcgccggtgaagcccggcaggctgaggaaaggcgcctcgatcagctcgcgaactcgcctgatgcgagagagggggtgcgagaggttgcgaagcagacgcactagaccatgccgccgccgacctcgggtctctgtgtgttgggcttggggagctcggtcgacatcgtggcggagcgggcgaacgggcgggcgaggaaggtgaggctggggctggttgtagtgattcggaaagggagccgggcgagtgcacgaagggacatgcagcggcgggcggtcaaatcggggagacggtggtgatggtagcgaaggacgggcaagcgatggcgatgaagcggtcgcttcttatgcgtttcgatcggccggccggggtcagaaggcgcgggcgtcggctgcgcgcgcgaatgacgaagcgcccggcccagatcggccaacccacttcggcggcgatgctcacccagcgcgactgctctcggggacgggcgaggccgctggcagggtcatgacgacttcacggcgctttagtaggcaagcagaagtgcgagaaaagtggtcgagaggaatgaacgggtgatatacaaaagaaggtgcaggcagaggaatgatcgaggcgatggcccgccgaggaggggagaggggggggggttgtcctgactgtgagtgttgccgagcggcctgcgttcgcagagggcagcacaatcgtatcgcccttcgagagggggatccgtcaagaaggcgaggcagggccagtcacgagccgcacaaggcggcgacggccggcggctagagtcggcagcgcgcagagaggccggacgctctgcagtagcgcgctcgacgggcgagctgacttaaatggcggtggcaaagccgacggcgtcacggcccttgtcgtagacggtgtagaactgcaggagaggagaagggcggtcggtcaggatcagaagcgacgtttcgggcgtgcgcgcgacgaaccttgcggaggaagacgtcgccgatgatccagatcgggccgagcggggccgggatgtcgaggcccataaaagccgagatgcaggtgctggaaagacgaaagggtctatcgtcagccaggcacggcagcagtcggactgagggaagaaggaggacgcacccgccggcgttgaggatgtagtcctcgcccttgagcatgtagtcctttccgccaaacttgaacgagagctcgggcaggtccggaatcgactcgcacgggacggtatactggccgttccagctcttggtcgcgccgagctccttgttgagcatctcggcgatgtcggtcgggagcgcaatgagcgacgtgcctgtgtcgatggcagcgcccgtgttctcgagctcgagcgactcgtcaccgaacgtgatgccctcgagttcgacctccctgtatgggcgagagcggcagaggagatgtcagcttgtctggtccattgaggccaaggagggggcgagggtccgcaccagtagcccttgcggcggacggggacgtagtcgagcttgcccttgtaggccgacttgtcgacgccgccgaagatggcctcgccgccgtcctcctcggacgagcccatgcggaacgaaaagacgggctcgtcgagcagcttctggtcaatcatgttgtaaaacggcgggacgatccggttgaccgagatcgtgtcgtacgcgagtccgaggatgccatcaaacttgccaaaggcaaaggcaagtccgggctccttggtcgtctcgccaaagtcctggcccttgatcgtcaggtcgccgatcgagagcgtgtcgcgcgaaatgaagccctcgaccgagcccgagccgtagcggatctcaaagtcggtgccgttggccttgtaggtcgacgaggctgaggagtcgaacttggcgtggagctgaagagtggaaggtatgtcgtcagtcagccaggccggattgggatgaaattgagggagacgcacgaagcaggcgatcgaggtgcacttggctccgggaacccagaggttggacgagccggtgtcgaggacgaccttgaacagctggggcggggtgccgagctcgatctcggcaaagtactgggcgttcatgtagtcttgagggcgagaaatggaaggtgaggggcggcggtcagttgcagggtccacgttggcgaaggagggtggcgacgcactgctcagcgggacgccgtgggcgcctgaagtcgtgaactcggactcggtctggcgagcgacgacgtcgcggtccttctgggtccagaagaggtcctcgcccttggcattcttgtgcttgcggccggcccggtcgttggtcgactctgcgaagcggccgagatgctcgtcggcgtggacggggacgaacggcgtctgggcgccagagtacttgtgcgagaggtaggcggcgtggttctcgacctgctggagcgtctgcgagctgtcgtcccggtgaatcttcttgagcggaaggctgcgagtagggaggaggttgggtcagtcgaagggatcgagggaggaggagatgggtggcgacagccggccgggcagggagatcgcaggcgcagactgaccggtggacgccggcctggaccgtcgaggcggccagggcggatgcgaccagggccgacttgatgttgaggagcatgtgtggagggggggggctccctccctggcggctgcgcgctgcgcgctgaccccctcttccctctgttctggcccttctccttgtcctctgtcggctgcccgtcgcttgctcagggcgaggtttttgcgctcagattccgattcagcaaccggtatccgatcgacagcccagaagtcacatttgtcgtcgctccgggccagtaccagtgcgtccaccgcctcctgtgcacttcccccttggccttggcgcttttcgcatctgactttgtcgtctcctccaggccgccggtccatccgcactgctactcgaacggtcacatctgcgcagacgtccttgggagcggctggagccgtgagtcctgtgttgacctctcgccacttggccgcattgactcgttctgacctctgtcgcatcctccttcgacagccgtactcaacgtccagaccgtttgtatcacgatccagagcatgctagcttcctgcaaggttcgtctgttggacgccactagatcaggaaggcctgggcgctgacagggttgacttggtgtccctccgactgtacagaagaaggagcggccgcagggcaacgactcctacgtccggagggcgccaaagtcgccgaaggacgccaacttcgtgtacgacgtgagtctgctagtgtccagtcgctcttggtgagagggcctctctgctgacgactacgacccgctcttaccgcaggacgacaccgtctgatcctcctcgccatctcgcgagccgtctcgtcgcctcgaggcctctcttccggcttcttacaagctatcttcacctgcctctctcgctttactagccggcccctgtcgcgctcctgttgcagggctgtcagcgccgcagaaccacagcaaggccaaccgcacccgtccatcacccctatacaacgacacttaacgcacctgcacagccctttaccactcctcctccggatatcatgtgccctctctatcccggcccgtcctgcctgtgccgacggtcgcgccttcatcatgctcctgctgcgcggcctcttcggccgttcgcgccgcgaacagtgagatcgtctttccggccgcatccgtcaccccgcccatacctcgctcctctttctttcgacaccctgttacgctggctctccctttctctttctagacaatcaacttagaccagcatggccgacgccgcggagctcgccaggcaggaaaaggtcgcccgggccaaggctatcgtgcgtctctggcgcgtcgcgcccgcgtctcggcgtctcgcctcccgacgaggccctctgccggccggccctggcagcctcagccctgttctgataagcttctttcgcttggtctctgacagctcaacaagaagaagaaggccgcaaagaaggccaaagctgagcctgcttcgggcgcatcgtcggtcgcggcggcgacaccatcgcttgacgaggtcgcgagcccgcgaccaagcgttgatgccggcgacgagaggtgcgacccgtgcctacccttcgatcaagcctgatactcagcggcggctcgactgatgacctgctccgtctccttctgctcaggctgaacctcgaggaggctgtcgtcgagtcgagtgcagcgccaactgagacgtcggaatctgctttgagcgcgtcgccgctcaaggcggacgaggtcgtcgacgctcctgagccggtcgtcgagccacctgtcgagaaggcgccggaaccggaacctagcgcaccggagcccgaggcggaagcaccggctccggcagaggagcccgctgtcgaaaaggtcgacgaggcaccctcggccgaggagccggcgccggcgcccctgtcatcaccatccccgccgcccgcagcagcgacacctccgccaaccacgaccgcccttcccctgccggcgacggcgccgcaagacacggccgagctcgactcgctccgctcgtccgtcgacgcccagaagcagacgatctcggtcctgacgaccgagaagacgcagcaggcagcgcagcttgatgagctcgacgggcggctcgagggcgtccaggccgacctggccaagcggaccgaggagctggccgacagccggtcgacggccggccggctcgagagccgtgtcacgtcgctcgagggcgagcggaaggacctctacgtccaggtcgaaaagcttactggccggacgaaggagctccaggccgccgagggtttcaaggacgaggttgctcggctcaagaagagcgaggctgcgctcgagaagcgcatcgccgaggccgacgctcgtcgtaaagccgacgacgagaaggagggcggcaaggttaaggagctcgaggagtcgttgaagcggaccagggaacgcgaggacgatctcgagcgcgaggtcgggcggctcaagaaggttcgtcccgggacgcgtgactaacttgcaatgcgtcaaatggctgacgccagatcaatctttcgcaggccaatcagacgctcgagtcatcccagcagtcgagcagctcaagccttgcgtcgaccaagaaggctctctcgaagctcgaggccgagcacaagacgacggccgccgagctggaatcgttgcgggagtcgcaaaccttggccgaatcgaacaatgccaccttgacggccaccaacgccgacctgttggccaagctcgccgcgctccagtcgtcgtcgagcgaattggcctcgtcggcaacgaccctccagaagtcgctagacgaggcgctcgcgtcccagcagaaggccgaaggcgagcgcaaagccctcgacagcaagcatcaggcccttagcaagcgcctcgaggggcttcagggcgagaacagcactctgctcaagcagctcgaggagatgcagaccaaggtcgtcgacatccagaaggaacgggttgagctcgagcaaaaggcgacgacgcttgagcgcgacctgcaggccgctcaggtagaggccaagaagactgctgcttcgctcgacgagcgcaaagctgcgctcaagacggccgagtccaaggcgcaggaggccgagactcgagctgacaagctttctgcggagtgcgttgcgcttgttccactgatcactctcgaccacgcgagctgggtctgacctcctcccgcctccgccagcatcacaaccctccagtcggagcaggagggttctctgcgctcgatccaggacctcgaacgggaccgaagcgatctgcgccgggtcacctcgacgactcgcaaggaggccgacgacaccctcaccctgctcgaggccgaacgggccaaggccgagtcgctgacggctcagctcgcggccattgacgaactcaagtcatctcttgcgggtgaagagacgaagcggtccgagatggagaagagcctcggcgaggccaacgacgaggtcagccggctcaaggacgaggtcgactctctccacgaggccgcggtcgctcgcaacgaagtggccgaggctgagcgggacaatgcggccaagggcgacaaggcggcagacgaggagcgcctcacacagctccagaaccagcacgccctcgagctgtcgacggccaagggccagatccgcaagctcgagagtgccgtctttgaggccgagaaggccaattcttcgtcgcagctgaagggttcgtctggtgcaagccttccaccagaagagtttctggtcgctcgtgctgacccttcgcgtcctccacagtgcacgagctacaagcggagatggagtccctgcgctcatcgttggcgcaggcgtcgtcgcgatccctctcgctgccgacgtcgggcaactcgtcgtcgcttgtctcgccctcgcgagcgccctcgacaaatccgttcgaccacttgtcgtcgcggccggtcgacgccgacctgcctgcctcatcgcgccacgcgcgcaaggtctcgctctcgatgctcaaggcacgcatggaggttggccccggcggaggtccccgcaaggtctcaactggcgggatgtcggctctgaccgttgaggaagaggaggaagagagcagcgccaacgtgaccaaggcaggttgttcaccgccgccggcggcggcgggcgccactccggcaagcgacggcaagccttcgggcccgcggatggtcacgcatcagttctcggaccgcgacggcatcatctggtgtccgtgctgtgagggcgatctgattgtgatctgatgcggtcatgtccttcgcctctccccgtcagaagccaggagacgccgcatttgccaggcgctcgatctcggcctgcccgaagatccgcagcggtactggcgagccgtgcaaggcaattccgttcatggcgcgagcgagcgtgtcggctcgcgtattgaatgggcgagcgtcgcgtcgtcagcggctgactggcagactctcgatcagacatcactgacgggtattgagggagtaggcgctcgaggagagggctgggtaggacgagacaccaaagagtgtcagcctcagaaccactcgccgtctagttggatcgtcgaacgcacagacaagtgtcggcggctctctcgacccacttggctctcgccgccggccggggtacggcgggcgcattgaactggggccgaaagtgaaaggcgcggtcaccgaggagttccgtcaggtgtgcctccgttcggcccttgatccgtgcatagggctggctgcccgactcgctgccaaggcgaagaattggatcagcaagcatatccgcaaacagcagtctagagttcgactcactcttgcgttgcgccgtgtccgctgaggaagacgaagcggggcggctcctcgagcgtctctgtcgcctcggcagcctgtcgagaagagagcatctgatcagcgtgaagctttgacgccccacgatcagtttgcgatgctcacacgcatcgcataatcgtgcgtgatctcgacgtaggcgtctttgctgacgtcctgctgcgagacaccgagagcccagatgattgcgccggagtccctgaccccgggccgggcgagcagctcgagcgagtaagtgtgaaagtccagctactcgacgaccgtcacccgcgacgcatcgtgagctggtaggctgtcggtgatgtaggccggcagctgggccgaccgcgcaaggacggtgatgtcgccgacaaccgggttggggaggagctgtcggaagacctgcgagccggccataccagtgacgcctgcaggggatgccagaaggtcagcctcacatccctcgctgagcatttgtgaggacgacgaaccggtgaggatgatgttcatcgtgaggaagagcgagaaggagcggagatgaagaaggctgtcgagatgcgcagggagctcctgctttaaggggttagtttcatcgcgcaggcccggcgcccgtacgaggcgcggcgagaagcgatccagattagtgccctccactttcgcccgaggggattctgcgacacgacgcgcgtcgtctgacgcaagttgagagtggcaagagacgacatgagcggaagacgagcgttccggcagcgtacaaataaggttgagccagctgctcgtcagtcaaaacgtcgtccatatcgaagacctgcctttccctccccacggcccccttcacctcacatcagcagcgcaccgcttcctcctccggtcagcctctccctcgccgctcgaagccgtttccgtgcagcgcgcctggcgcaagcagccagccggcccagccgtgactcgtcgtccgcctctcgcttggcctcagactcggcgacggccacgaccgcccaggcgagcagcaggacgaccgtgacgccaacttccgtcaagcgctgtaatgccgtgcgcgggctgccgccagagaaccggtcaagcgacgcatggacgatgaagctgccgccgccgacctggaagtagcggatgtagccggaccggtcgatgaaggccgagacgccagccgaccggccgctaccgcccgagtcgcagaggacgagccggacgttggtctcgatgcgcgcgaacgggcctgggcgaggagcgatagtccgactgagtgatgccaggtgcttgaggtaacgagcgtgagggagcttcgcgagctggcgagtagactggggaagttgaggtctggaggctaggtgggcaagaaggaggtcaacctcaggagggcgttttagagctgaagcaagacgcatcgttgcggatgatgaaggtcgctgaggtcggccgccggtagttgagctcgagggttgaccaggtcgacttggcgacgtgcaatggaggaggcaggtcgagcgtgagggcgggcggcgtctgcgggtgctgggcgatgctgaacgactcggcgactgagaaacaggagacagacggtcagcaaatacatggcttacgactaagcggcacgagacgatgcactgggaacgcggtgctgtttgtgttactggccgacgatctcgccctcgagtccaatcataatgacggcgttcgcccgcagccccgcgctctcgtcgtccggagcgccatagccgacggcaatccacacgccgccgtgcttagcgacgtctccgaccgaggcgatcatcttatccctctcggttcaaaagacagtgagatagcctcctcaggccagaggaggaccgtcgcggaggagacgagccggtggggctcagcgaggtagtggtcaagagtcgacgtctggtgtgaagccgacgatggccggcccaaagatcgggatgaggaagatgctggagtcgaagagcgcgccgtcgagcggcgtccaggcggcctgtgaggggcacggcagaatgatcagcgcctttacgtctgacagacatgagaattggtcgtacctgtctgccgagaggcgagacgagccccttgatcccccaggcgccagctcagagagtcgggaagagaagaaggcgcgcgacaggggcgcgtcgcagcttcggccgagacgctagcgagactgagcagccgacaagcaccaggacgaccgccgataggagagcagcgaggaggtcgagcgttacgactgcgtgggagaagggccgaagtgcgctgtcgattgatttgaagtaggccatggcgaggccgggaacgagaccgacggcgggacggagggttcgcccgagaagcggctcccctgagctcggagcgtgggccaagagcacggcgagcaagacgacgaccatcggtccagagggcgagaagcagagcccgagggtggagagcgtcaggacggcaagaggcagggcgtaaggctggagccggccgccctgggcgacgagctgcgagaggggtgtggggtctgctgcgcgaggaggaggcggcgaaccgctgggctggtcaggactagagtggctcaaggtcgaaaagcctgtacgaacgagctgctacggggccctgagagcaagaatttaaagaaggaggaagggagggagggcgagagggacaggaggtgagaggaggtcagtgtgtcgactctgtcgacgcggccgggcgaaaggggggcttcgacacgtgccgacacccgcgggctcgggagagaggaggtcgagagctggacgacagctccggcaggagcagcgacgctccctccgacctctcccaggaagcggctcgacgtcgagaggcaagggctgactctcctccgctctcttgcgaaccgacaggacgcgcccgacctttgcaactgccgacgacgaccgacccatcgcacctctcgcacctcgtcaggcaccgcttggacctgatgccgccagctcaaccgctacagcctcggcaagcaatgacgacggtcgtcgagaccggcctgcggctcgtccgggagtttctgctggacccgaggcggttctggcagctgacggcgctgctcgtcgccggcgagctcgccctcggcctcctcatcatccgcttcgtgccttgtgagcccctctttggctggcgctgcgctgtcagacgaattctgaagggcaagctgccgacattgactaccttacttggcatcagacaccgagatcgactaccgggcctactcgcagcaggtcgccggcttcctcgcaggcgagcgtgactactcgcgtctcgagggcgacactgggccgctcgtgtacgtcggccttcgtgcgatcagggcttgctgtccgtcggctgacccatctgccatgcgctcacgctgcatccttctgcctcagctacccggcgctacatatctacatctacgcgatcctcgagcgcctgcccaaaactccgccctggccgctcgcgctcgccttcccggccaagctgcacggccacctgatcctccagctcgtcttcctcgcgctctacctcggccagctcggcctgaccgcagcgatctaccaccaagcggggatcccgcagctcgcactcatcccgctcacgctcgacaagcgcgcgcacagcatctacatgctcaggctctttggcgactgctgggccgtcgcgatcgtctcggtcgccgtcctcttctggcaacggggctggtggaagactggcagcgtcatctacaggtgcgccgttccaggatgagcgggtcaccctgcagctttgagctgcgcagctaacgatcgcaacctcccttcccggcggcagcctcgcgctcggcgccaagatgaacattctgctctacctgccgggcctgttgctgctctactggaaggctgtcggaccggccaagatgttgcttaacctcgcactcatcgggctcgtccaggtgcggccacactacacaagcggtttccggcaatccaggctgacatcacaccctcaccccctcacagctcctcctaccagcgccgttctttctctcaacgcggcacaatgcgacggcctatttgacgtccgccttcgacttctcgcgctccttcctcttcaagtggaccgtcaactggcgcttcctcgcggagccgacgttcctcgcgcgcgagtttcacgtcgcgctgctcgctggccaggcgctcgtcctcgcccttcttggctggcggtggagctggagtgagcgaggtggagcgctcggcctcgtccggcgtgggttcgaagagccgctgaagggtgcggcgcgccgcatagtcggcccgagaggtcggtcatctttccgtcttgtttgacaggcccgagcaccgctgacactctttgcatttacttgcagaggtcgccacgattctctttacgtccaacctcgtcggcatcctgtttgcccgctcgctccactatcagttccagtcgtggtacttccaccagctgccgctgctcgtcgccctcggccgctcgccgctcgccggcgcgctcctgctcgcgccgatcgcgtacggctgggcgacgtacccttcgacgaccggctcgtcactcggcctcgtgcttggcaacgcgggtctgctagtgctcgtctggctgggtgacgcagaaggccgccgggcggtgagaccgcagagctctgacgtctacgtcgccggcgctgatagcaggaaggcgcggtgacgctgctgctgagaatggcttttcatggacggctggccaggtgacaatcagtatctcgaaaaggggagcgcgcgagcgctggaagacggccgacgatgctggatgaggttgacggcgtgaccggcgaccccggtcaaggggtgacggacgcccaccggttccggatgcgggggcgttgcgtcgggcgcggagaggcgcgggcctgctgcgcggccggccgacgcgccttctttgcgcgggcgcgtcgcctcgcttcttctcgcccctccgaccacgactctcttctctcgacctcagccctctttactccgaccttcactctctcactctccttccaagcagcctcgaccatgcacgcctcgctcctcgccgccctcgccctcgccgccgtctcggtcaaggccctccaagtcacctcgcccgacaagcagaccgagtggggatcgtccggcagccacgtacgcgtccccttcctttcatccctcttcctgccagccggccttgcccaggccagatggcagctcgctccgacacatagcgacagcttgctgacttgaccgctcgttttctctcacccttcttgcctcttcctcgctcccgccgccgcccacaccgcgtcttccttgttgccgccgcgcgtcttccttgttttcgacgccttggcaccgcccttctcctgccacctctcccttccgtcccacctgcccacgccttttcctcatccagaccattgagtgggatcacgtctcgtccgaccctgactcgttcgagatcctcctcgtcaactttgtgcgtcccccgccattcttttcacgtctccgtctgtcacctcgccggcgagcccgtcgcggggctcccagctggcgcgctctcgtcacgcccggccaatcctttcaggacgcgacgcgctgaccctcgcgatctctcctcgacaggcctcgttcccgacgacgtccgagtcactcaagaaggacgtcgactcgacgaccggctcactctcggtctcgtaccccgagttcgtctcccgtcgcgacctgactgccaagccctgcctcagtcctgactcctctgcctatctccagcggttcgtggcccaccggtgacggctaccagatcaactttgtgaaccctaagacgacggccatcctcgcccagtccaacatgttcaacatcacctcggacggcgagaccgagtcgtcgacagaggccgctacctcgtcgtcgtcgtcgtcggccgcccggtcgtcgtcgtcggctgcctcgtcgtcttcgcgcatggtcacgtcgtcggcctcgtcggctgcgtcgaccggcacggtcgctgctgccgcctcggagagcgcctcgtcgtcgaactcgaccatccctgtgcgccccttagcaagtcggaagagactgcttcgcgagagtagtcgactgacccacttctttctcactatctcagggctcgaccggcaccacccctggctcggccggctcgcccgtcttctcgctctcgggtgctgccttcgtcggcgccctcggccttgtcggtgcggccctcgcctaagaaggcccctgcgtcgccctaccaccgggtcgctcgaccagctctctagatcgagttgaggcgttgcctccaggcagcccctcgtctccccaccccttcgacccactccttccctggcctttggacattcaaccctttcctctctcgtaagagaggcagacgccgccccacccctttttcggccaccctgccctcctcttgttcgtcagaccacccatcgctcgttatcgccgacccaccttcgttcattctccccgccttgccgggcatcgctcccgagtgacccctcgcgaacgcgctctcttgctgtcctctgtttggtctcgggccggcccgcttatctatcccattcctttgctctgcgagcgagcgtctatgacagcagaggcacaccttgttggagcggccgatgtaggagaggagaagtaattcagtagcagccgctcgagacgggccgactgccgcgcaagtcgccctcgacgcttgctgacgcggagtcaacgtcgccttgccaccggcgctcatccatcgaccgccgccccgcctccgcatggacccaacctcgctctggacgaaacaaacgacgagctcccggccggcctacccgacgccgacgttcgtccgggagcagggcctgaagtcgccgacggctggccgcccgcccgccccgaccgaggcggaagacgctggcaggtggtaccgcgagtgggtcgccagccacgcctcgtccgagccaaccaagccgtcagtcgctctctcgataggcccggtcgcggaaaatgacgacgacgatgagatcgtctgggtgccgcaggacgaaggatccgactcagagatcgagtttcttgaggaggtcccggcccggtcacccctaccccctccaccagcgccagcgccagctctcgcgccacctctcccggtacccaaccctcgaccgaagccatcgctcctgcctttgccggacgccgtctccctcccgtccgacccgctcgggacgaaccactttgtgccgttcgcgctgccgacggcgctcggcacgtcgtcgtcctccgccactgcgccgccgaagcgcggcagcaagctcgtcgacctcctcgtcctgccctcggacgcctctcacggcccggccttcgcgccgccggcatactttgcgctcgatgcctccaacaagggccacgagatgctcaagcgggcatttggctgggacgggcgggctctcggccagcccgtgcccgaggccgtccccctttcggcgacaacttcgaccgcgcccggcgagggcacacatcacgacgacgatcccgagcaggccatacatccagcagcagcgcagacgaccgcttgcatcgcaccgatctcaacgtcgctgctcccgccgcagcgcggcctgtcgtcggccctcctcgcccaaaagcgcgtcacgcactcgcacgagcagattgaggcgagccggcggaaggcgcgggccgagctcgcgtcgagcgtgccgagcgcgaaggagcgtgtgagacgggatcgagaggatcgcgagtaccgcaagggtctggcggccgcgctgaacgcgctgtgaagctgagtcgtaacaagcctggtgcgtcgctctcttcctcggcgtttgtcgaccggctgagcatcgaatgctgatcgcaatccagtcctctctcagtcggcagctccactcatcttgtcgaagagccatctcttccacccgtcgcccgcggactcgcacggccctctgctcctgcgtctctctcgtcgaccaatgcgcgcgacgaaccgccactctgccgccgatccagctcgacggcttcacgacggtgacggccgctcatcaagccgaagcgctccgcttttcacaagtccgctcacccagagctccggcgcaacatttgtgacccgcacctgtcaccacaacgccctcgctgccgacccgttcgacgcgccgctgaggaccggcgcagatggctgccctgcggccgccggtggtattctccatgccagctctgcggattcgttcccggagatctctatgaagtctttcccctgccagcatcgtcaccttttataagcgaactcgccaggccgcaaaggaagaagggcgaggaccacttgcgagtcgcggctccggccggccccgcgcgtcggacgcccaaaacgcggctgccgctcggccgtgccgactccaccctgcccagctatatcgagctcctgcgacgttcatttccgtctgcctttgattgcagccccgctcgcctggtcctgtcacgaccggggcaggcaggcttctgacccgtcttgttttcgctgacttctctcttgcctgacgcctcttgtgctcccgccgaccaccgacctcctgttgccctcgcttccctccgacccttcttctacgaccggctgctgcccgacgaaaaccaatcccaaccggtgcccgaccgccttcggcttaatctgcctgtgtgtcgttcaaccagactgtcagggaagggcagctgggctcaaaaagcctgctcaggcacacctgcgagcacctcggctgacacctatcccctctgccgctccctctcagtttccaacctacccaccatgctctcgactctccctgttgcctcgctgctggcgctcgtgcctgcggtcctcgcccacggcgaccacggcatgcccgacacgccagcgatccgtgcggctggcatcgctcaccgcgccaagtacgatgcctggctcgccgcccgcaagacgaagcgcgactcgacctggcaggacgaggctgccatcaaaggtgtgttcgccccaggccgcctttgcacggtgtagacaagtggctgatctggtccacctacaccctttgcttgcgacgctcagaccccgagcaggagtgcgcctactactcgtatgcgcccgtcaccgagagcaagagccagttcccgacgatctgggagacggcgaccatcgtcgctggcgacacggccgcccaggagaagtttaacgagatcaacagcacgctgccgtcctacatcgttcccaagggcacggccaacggcgacttttcgtcctttaccccgacctacaatcggtccgaccccgactgctggtggacgttcaataactgcgtcaatagcaagtacgactacctcaaggagaacaatgtcaacgacatctggcgcgtccccgagcccgagacgtttggtcttcagttcgacgacgggcccaactgcacgcacaacgccttctacgatttcctcaaggagcaggacgtcactgcctcgatgttctacattggctccaacgtcctcgactggccgcttcaggcccagcgcggctaccaggaccagcacgaaatttgcgtgcacacatggcaagtacctgcctcttctcctctccgcctgcggcctgttgagctgaccctcttctcttaattctcttgacacgacggtcaggtcgcaccagtatatgacctcgttctcgaacgagcaggccttcgccgagctctactacaccatcaaggccatcaagctcgtgaccggtgtcaccccgacctgctggcgggcgcccttcggcgacgtggacgaccgcatccgcactatcgcccacggactcggcctccagcacatgatgtgggagtacgactcggttcgtccgctctgctctttaggacatcggcctttgcatgacgtgctgacgatgtctcgactttgcaggacgactggaaggtcggcgtcaacggcgtcacccaggagcaggtccagcagaactacgacgacctcttcgctaaggcggccaacggctcgttcgccaccaccggcaccatcatgtgcgtttgcgcgctcttgccttgcccgacgcgcttcgcgagactgaccgacctccccaccctcgcaggctcacgcacgagattcgcaacgatacgatgcagctcttcatggacaactacaccaaactcaagagtgccttcaagtacctcgtcccgatctggaccgcctttaacatcacccagatctaccccgaggcaaacgcgacgcaggccaaggtctttgccgactacgtcaacgcccacggcggctccgtctcggccctctcggcgacgccgacccacacgatgaaggacgcgacggcgactggcgttgcgtcgacggctgtcatcctcggtactgcagcaaacgccgtcgcaagtggtggtgctgccgcgtcctcgggcgcgtcggccggcgccgccaaagcgtcagagagcacaaagagctcgggcgcctctgtcgtcgtcggcggctcgctcgctctcggcgccttcatcgccgccggagcatcgctgctcgccctttagatgcccgactctttagacctgcccctccatctgccgctgtatccatttgcaccccgacgcatcttcacttcttcgcagcctcggatgataggatcgcaacccttcttgctggcctgctagtctgcagtcaagatgacatctatggcgggcgcgagcgcccgagaaagcggttaccaacgggatcacctacgcctgctgccgagctcagcttcaattcgcttgcggatgacggcccagacaccctcaacatcgacctcgcgaacgacgccaacttcgtcgtacatcacgccgagctcggacgccatgttctgaaaatgaaacgagtttccggtctcctgcggcttcagctcgaggatgctcgattgcgggccgggcgggaggaagagtgagaggccgagagagcctccatggaggccgacgagaatcgttgtgctgcggcagacgacaagtcagttgctgtcattcgaagtcaaagagaatggcagcggtaggtctcactggccaacaaagtcaatctgcgtttcgatagcctgggtgacggggtctagaggcgtacagagtacagcatcagccatgtcttggcttcgctgacggcgagcgagcgactgcacataccgatcgtggcaaagcggagctcgaccgtagcatcgtcggcgccgtccatcgcccagcgttccggctcgcggtccatctggctgaagtggcagccttggctcttgcacatcttctgcatgccgctctggatgcgctggatgagctgcggctcgttgtcgatgtggcgcgtctcgcgccagtttgaccactcgccctgctcgcgcgcgatgcgctccctgcggacggcggttagggagatcagcagccgagcatgtagggatcaaagggaccaagagtgacatttgcgcgcgcgagagccagaggacgttgaccgcgcgcgcctttggtcgcccgggcggcaggccaaacaagtggcggtagtagtgcgaggctgcccacgtgaggccggaagcgcaaaagtgtctgcaggagaaacagtgcaagtcgtcagcacgtggaagatgatgcaacgggaagagacgcactttttgtcgaccccggaggcagacaaaagcgaggcgcctgcaccgatcgagtgtatcgcccgactgactgcagagccgcaggtgtcggaggtcaggcactccagtctacggcgagcgtacgtcaaaattgatagacgtgccgcatgttccgggcgaaaagggttcaagactcatcctacgaggcggatagctgccgatgcgatcccctaaagaaaagaagggagtttaagacggtcggagctgatgtcagctgcacacgacgatggcgagtcactcgtcgagccctcactcacagacggtcgtgaagtggttcctggagatctcgaactcgtcgctgaagaccagctggagccgctgggcgtcctcgagcagcgacgggtcgttcattcctgcgatggccatcgcaaggaaggtcgtcacgaagtcttccgcgacatggactggacggcgcagagagaggggtagcgtcagccagggaccaggatcgagagcgcgccgtcgacagctgacgcacagggattccactcgtcttgcctagaccgcggaaagaggagcgcagcgtcagtatcgccgctcagaacccccagttgaagacaggcgcccacctgccgtgaaacagcagcgggtgctcgactctgccgccctcgcattttgcgccctgcagtacgtcgacctggttgccgaggaacttctcgccgtccatcatgtcgaggacggcctcgccagccggggtgacagcgcagccgtgcgactggaagagcttccaggcttgaggtgacgtgcctttgggaggaagccggggaccgatcatgatgtcggacgacaggcagtagctgcgcaaggaaaagcagaccaggatcctgtcagctctgccaaccctcttgaacgacagcctgactgtcctctcaccttgccgggtacggccaccactttaggcgtggcgagtggtagttcgggaagcaggtgatttcggtcctgggatccagcgggatactcggcttcgtcgaagcacagaactgcattgcggacgagttgtacgccctgcgttgccgaagtacgtcagcctgcttgctgccttgagcggctagagtgcattgacgactcactgtgccagctcgctgccgagctttccgtcgcatgtcgacaggccgagcgtcgcaatctcgctctcggcgagagcgaggaaccgggcgacgctccgaacagggtgcaggtcgcgaaagtgagcgccaggcacggtcctcgcgagctcgcctgggggcagcttaagatcagcgccgtcctcccctacaggaggcgaaaggcacacaccgtacgagtagttgccgacgaggtcttcccaagctgtctcctctctcgacacgctgtgcttcggaatcggcttgtcaccaggttgcgacaggcgctgcgcggcgaacgagccgatggcgagcatctcgtgcaggagggccagcaggccgaacagcgcgaggagcgcaagccaagggctcttgcggcccagagcagcgagaacatgcactcgatctcggaagtcggacgaccgtccgtgattggtcggcgtcgctatccatgcgctgcccgaggcttcgaagggctgccgcacggacgagctcggcaggagctcgtaggcggcagcgggcatgcctgactcgtcgacttgaaatgagcaccagcaggacgagatcggcttgatttgcgacgtcgatcgtcgttcgttgcgaagggaaaacggggcttggggtccttgcaggttgacgtctagagggaaggaaggtgacagcagacgagccgaagacggcccgcagcgggaacgcgcggaaagcacgagccagcacgtccgagccgccttcaaccgcacgaagctcaagagacacttcctaaagcctgcatattttcataagagctcgtctcgtcagcttgcgaagcagcgtcgtcgttcacagaggtctgacggtctgacggtctgtcggcctgcccggaggcggccggcgtcgaccgcagcagcagcagctcgactccgcgagcgtcccgaccctccgacaatcgccttgcctcgctctcgctttgcattcatcttgcctcacagtcctttggcaagcggcaccctcgccggcagcacaccgatccgagagtagcctgcttaagtgcgataactagagctgccagcgcggcgcaaaatggacggcatcgtcacgcccatcgcgatcctactcgtcgtctcgtcctccaaaggcaacacgatccccttccgctggccgccccggccggcacgccggcagcggaccgagcaacccgactggaaaacgtcgcaaggagcgataaacggctccgctttcggcggaggctggaacgctggccggcgagcgaggtgagtctcgcaactagctgccgactctccgctgcttcgacctccagatggctgacttcgacgctctcgaccttgattgactgcagcgagcagtcagaactcacagactcgggcagcgagagctccgaggacgataacgaggctttctttccagtccagcagaagccgtcgagtttgcgcaagctcagcgaggcgaccgagatgatgccgtcgccgctcgacgggcgctcgcgcagagcgccctacagcggttcctcccaaccctcctcccgagcgtcatcgatccactttggccacagccgggcgccgtcgcaggtccggaaccgaacgctcagcaacgacgcgccctccaagcgaggcatgtcgccctcggtcacgacccggccgctgccgttcgataacggctcgagctcccccgtcaccgggctcggcgacaatgcaacgctcgctggcggcagcacggccgctccagccgctagtgtcgacgagtaccacacgtacctgtcgtttccaacgacgttcctcgctcacattctcacgccaaaggaggagatctgccagcagcgctttgatctggccgtcgacgacctctgcttcatcggccatccgattcggcgcgacggatccgacaaagccggcggaggatggggtggtggtggggtagttcaggaggaagagaggtcggcgcaaccgtcgaacgtggcgacgagtggcggcggtagtgagcgtggccgggtgaagggctctcgcttcaccccgagcaacctgctcaacctcgactctggtctcgccagcccggccgtcggtcggacgcagggcacatcgctgccgaacgtcaccgagggcaaggctctgaacgcatccggcaacgcgtcaagctcgggctcgcggccgccgccatcggcgccgtcgaccgccagcgcaattcccatccaggagacggccgacaaggatgtgccctccatcagcttcttccaccttgtcctcgtctgcgatcagccggacggctcgcagaagggcccgctcgcgcctgagcgcaagctcgaggccgtctacaaggagatcgtcttcaaggtgacggctgcgctgctcgagtcgcagctccgcgacaactgggtcgctcagcagggcactgagctctataaccttcgcgacacctgccttcaagagcgtgcgtctgtcgcctggctctactggagcgccgaaactgacaccagatcgtctcttgctacagttgtgccctgggacagcttctatgaaaaagcgctgcagctctcgccgctcgcccgcgcccttcgcaaggtttttgaggccatctgcgcctaccccttttcgaccaacgtcacgatcggcggccttcccttctacgtccagctaccgctccttcctccgtcggccgacctcaactgggcgctttgggaggaccagaacccgctcggcgacggcgtagactcggaggacgatgaggaggccgaagagcactacctgacgcttgaccggagctcgactattcggctcgccccgtggaaggcgctccttctcctggacgagaactcgctgctcgcgcacagcgccagtcatagccaaggccgcatgagtcgatccgacagtggcggctacccgactggcacccgcggccggctcgactcgactggcacgggcgcttttggcagcttctggacgcaaggcgccatgacgactctggttcctgggccgggcacagccagcgcgccggactcgcagaccaacacgccgaggccgagcgggacgccactgttgaggccggttcaactcgactccgaggtcgcctcggttgccgagcatcgtgacaacgacgacctgccgctagaggaggaatcgacgccgcttttcaagatgtttctcgccgccatcaagcccaacatcacgtacgtcctcgtctggcgggctcgtacgaaccgatcctgatcctctcgcgcccactcagcctcgccgagattgtccagctcccgagctttgtcgatgcaggggtcgacttgaagcgagacctgtacccgttggcccgccgtctcgtctggaaggtcggtctttgcagtgctcttcctttcgcactctcaggaggctgacctaagaccttcttctcgacgacagcgccgtgcccgcatcatcctccccatcaagcccgggacgcgcaacatctacctgccctcgactagtcgtggcaagaagtatgttttgagctgctctcccaggcgagctcggaggctgacctttgcacctcttgcagcatggctgctcttgtccaagacttcgacgagcgcttccccgagctggcaccactcctcgagttctactcaaagctgtctgccgcgcccgtcccgtacggcacgcttaacacggaccccaagaagaagaagctctattacgaagcgctcctctggctgctgcgagccgacctcgtcatcatcgcgcccgtccgcgtccgactgaaaatccgcaaggagatcaaggagcgcgcgagggttaacctcatcgagacgcgcaagcggctcgagcgcgaacttgaggtcgagaaggagccggcacagcggcgcaatcttgtggagctcatcgatgccatgccggacgaggccgagttttcgatcctcgagcaggacgtcagcgtcatcgccagcccgatcgactgccgaggcatcgtccgtcccttctctccttcgcagcttgttctcgagcgatgctgatcctccgtgctcattccccccccccctttgttttgctcaggagcgcgcttggatcgaggccatgtcgcacgacaagtcgccggccgacgccgaccttttccgacggttcgtctcttgctggcaacggctcttctgcttgtgctgacgtcgcgaccttctcatcagggtccgccgctactttgacggcatcacgacgatgcacgagatccaatatcgcgaggacgtctcccggcgcgagctcaaccacctcctccgcacctacgagcaggatctgatcacctcgatccacccctgaccgacgacagcccgacacgatctgaaacgatgaccccttgacgacctgcgaccgagagacgggtctagtgtagtgtgtgcgttgttacaatatgggaggggtgtttgatggtacaaggcaggaggggaggcaggcgggaagatccgagacaggcgaggcggcataagagacggcatagacggtcgccgtatcctcctcagctgacctgcatgcgggtcgcgatgttcatcgcttgcagctgaaggagagagagcgagacggagagtcagccgcgaaacgcttcgagatcgggtcaaacgacagaagacgcacctcctggaagagcagcttggccgcgtacggcaggtggacctgcgagacctcagtcttgttgcggcagtgcgagcactcaaactgctgcttcttgagctgagcggtcgccgccataccgcagatgtcgcagacgtggatgcggtagctggagacaggagacaggtcagcaagccagcggcagtgcagtcggggtcgcaagcaagaacgcacccgtccgacgcgtcaaagagccgctctcgcagaaagttggcgatgccgtgcgcaatcatgcagtctcgctccatctcaccgaaacggaggccgccatcgcgagaccgaccctcgacaggctggcgcgtcaggatctggaccgggccgcgcgcgcgggcgtggatcttgtcgttgaccatgtgcttgagccgctggtagtaggtcggcccgaggtagacctgggcctgaagcttgcggccggtgtggccgtggtacatgacctcgagcccgcgcgactggtagccattctccttcagcttctgcgagacctgctcgaccgtgacggtcgtgaaaggcgtcgcgtcgccttcggtaccctcgagcgtcgcgaccttggacaggagacactcgacaagatggccgattgtcatacgcgagggaatggcgtgcgggttgatgatgatgtcgggcgtgatgccctcggacgtgaacggcatgtcctcctggcggtaggtgacgccgatcgtacccttctgaccgtgccgcgaagcaaacttgtcgccgatctgcgggatacgggtcgagcggatgcggatcttgacaaacttggcgccgtcgccgttagtcgtgatcaggacctgatcgacgatgccctgctcggctgcaaagggggcaagaaaggcgatcgtcagctgactgtcatgtcgcacgatgcaagggaaccgggagggcgcactcgacttgagcggggtcgagacgtcacgcttggtgtggctctcgagccgctgaccgagctcctcgctatcgggcgggatgggcgccgtcttgccgatgacaatgtcctcgcccttgacgccgacgccgggggcgatcaggccgtccgggtcgagcttctcgtacgtgcccatcttcatgcggagcgtgttgtcccgagtcggcttctcaaactcctccatgacctgcatgccgaccttcttctcgacgtcctggtaggatcggtagtagattgaccggaagaggccgcggtcaatcgacgactggttcatgatgaccgagtcttcctggttgtagccagagtagcagaggatggcgacgatcgcattctggccggcgggcagctcgcggaacttgaggtactgcatcgaccgcgtcgtcgccagaggcttctgcggatagtagaggatgttggccatcgtgtccatccggatctggtagttggtgaggtagatgcccatcgcctgcttgcccatcgccgactggtaggtgtttcggggcgactagaaaggagggaggggggtcgtcagcggaaggaatagccagcccatgtcgcttcgggagggggggacgcacctggttgtggtctgggaagggaatgatcgaggcgcagatgccgagaatcatcgacgggtgaatctcgcagtgcgtgaatgtgtgcgagaaggtcgacgtcttgatgcgctcggccatgtggaagtcgagcccgccggtcgcctcgcggatgcgctccgtctcgcggtcgcgaaggtcctgggcgtcctcggccgagcgggcggccgcgaggtcctcgggcgtcatcgcaatcatgaccgtttcctcctcctcggcgtcgaggagctcgaccttgccctcctcgagcaggtggttccacgagtagtagttgtcgtcttcgatcgtgatcgactcgtcttttgtgttctggagccgggcgacgtcatgccgcgagatgacgagcttctgctcctccgagacgacgaatagcggccggcagacgcgaccggcgtccgtgtaaagccggagctccttctcgcgaatatcgcggacgatcgagacctcagacttgatgtcggcgcaccggcggagacggacgaggtgcttcgagagctcgttggcgtcgcgatggatgccgacccaaacgccgttgacaaataccttcgttgccgacggcgcgctcgcgtactcctcgagctgctcgaggccccactcgtcgaggaactcctggatcggcgccgagtacgagccgaccgaaatgtacgacatgagcgcgaggttcttgacgagaccgcatgcctgaccctcgggcgtttcggccgggcagaccatgccccagtgcgtgttgtgcagctggcgcggcttggcaatcttgccgtcgcggccgatcggcgtgttgcaccgccgaagatgtgacagcgtcgaggcaaacgtgtaacggttcaggacctgtgagacgcccgcccgggcctgcatggccttcttctggtcgccccagttgccggtcgcgagcgagtacttgaggccgttcgtgatggtcgccgaccggacggccgagtcgagcttgaacgccttgcgcgtttcgacacactggagaatgaggccagaaggtcagcggcaagctgcgggcgggcagcggtcgacgagaggaagcgcaccttttgcaggtaccggtagacgtccttcgtgagcttcttgaaaagcatgcggaagaggccggcgaggagcgggccggcgaggtcgagccgcttcttgccaaagtggtcgcggtcatcgagctcgcgccgctcgagcgcggcaagcaggagccggtggatcatgtagccgaaaaagtacgcctttttggtctcgaagccctcgtcggtcgagacgtgcgggagcatctccttctggagaatctcgtttgcgtagcgcagccgcttgtcgcgcgtcagcatgctcgacgttccgcgccggccaatgaaatcaagcgcaatctcgcgctcctggaccataaaggcctcctcgatgcagggcttgagcatgtcaagcatcgccgtgtccgactggtcgtagcagatgtgctcgagcacctcgcggtcggggacgatgccgagcgcgcggaagacgacgacgatcggaatgtcggtccggatatagggcagcgtcgccttgatcgtgttgcccgacgtcttttcctggccgcggtggtacatcttgacctgcatcatgctgatcgacttgccacccttttcgaccatcgagcggatctcggcgaggaaattgatcggcgacggctgagccttggcaaagacgtagatgtggttggccgccatccgctcctgcgcaataaggaccttctcggagccgttgatgatgaagtagccgccctgcggaggcaccggggggggcgtgtcagcgggtcggcaaggagactgagggacatcggcctagcgcggcggccgcacctggtcgagcgggcactcatttagctcgtactggaactcgggctcgagctcgtgcagcaggcagaagttggaccggagcatgatcgggatctgaagggcagctcagtcagcacggcccaagcgggttggaggcgcgcgaccgacagcgcacctttccgatataaatcttagcctcctccatctcatcctcctgctcctcccagttggcctcgattgggtcctcatctgacggcgcgcggaaaaccgacttcttcatgtcgacgtagagcggggccgagtagctgcaggtggcgggcgtgagcagagcaggtcagcaaccctcgaacgccgcccacatatggcaaggagagctgcgacgtacgtgaggttgcgcagccgggcctcctgcgggaacatggcgttgaccgtgccgtccgattcggtcatggtcgtcttggacaggtagatctggccgaacgagagctcgtaccgcctcgtctcgtccgtgtcgtggccggtgtgctggtcgtactggtcgagcgtgaggttgccctcctcgtcgacgagctcctgcatgctgttctcaacaaattcgttgaacgactcgagctgctgtgtgacgagacccttgtcctcgaagaagctcgagatgacggtccagaggtcctcctggaggagctcgccgtcgtcgtcgtagtcgagcaggtcgccgtcgtccgaggcgaactcgccaagcgcgccgggcgacgtcggtccgccgagagcgccaccagcgagcgagctcggatcatagtcgtactcggcctcgttcttctcgaatgagtaggcgccagtgtcctcgagctctgcgaggtggcggccgggggaggcacggacgcaagcggctcgtcagcctcagcctgaccgagcctcgacgacgctatagacatccacagcttgcaatgaccgccgccagcgcatggtgaaaccagaccaacgagaaagctccggcagtcgtgcggacgggagaagaaggagagggacgcactctcgtcgtcatactgcatgctcattctggccctcgtgctcgttgacgcgcagtcaagcggtcggtcgcgtggagtagcctgcgtgctctggaggatctgctgctctgcaaagagggcgcgagaagggaggcctagaaaaggcgggccgctaccgggcgctggaggctcgaggagggctttgctgatggagagagacctgagcggcggtcgaggtccgggtgctggcctctgcggacggtctgcagggtgccacgagacggtcaacgtcttggctctagaggcaagacggcggccataacgcgctgttacccctcgtcgctacacactttttgggtctgctgctgccgaggaacgggaggaggagtgctcgtggcggacggagagtcgatggtcgcggctgagcgagaggagacgcgcgcgcgcgaggaatcatctatgccattcacctatcggcttagacggcaaacgacgccccgggcctccatccactgcgcctcgagcctgaagacttcgtcctcgacctcgtaaccaccaaggctgccctctaagccgcacctcgctctccctcacttttctaccagcctcgcgcagctctgccggagccctagttcaagatgggtggcggtgatctcaacatgtgcgtaggcggaaggccctcccttcagcagctccgacccacccccgaacgacgcgttgacatctctcccacccttccctccgcaggaagaagtcgtggcacccggtcctgctcgtcaaccaggagcgggtctggaaggccgagaagtccaagtcggaggaggaaaagaagctcaagcagctgatgaaggagcgggccgaggagcgccagctagccgagctccaggcgctccaggagcagcagaccggcaagaagaaaacggataagctcgactggatgtatgcgacgccggcgagcggcggcggcatcaagggcgaggagctcgaggactaccttctcggcaagcgccgggtcgactcaatcctcaagggcgacgacgagaagcaggtgcgtcaacgccctctcttcgcaggtccgaccagcagctgtctcgttgctgactctggacttgctgcccccgccaataggtcaaggagcagaaccgccaggcgatcatgatcgccgactcggctcgcgacacggccgccaagatccgcgaggacccgctctttgcgatcaagcagcaggagcaggcggcctaccaggcgctcatgtcgaacccgctccggctcaagcagctcaaggagaaggagcttggcaaggagggtcgcaaggaggagaagcggcgggaaaaggaggagcgccggcgcgagaaggaggagaagaaggcgcgcaaggcggccggcggcagtggcggctgggatcggagccggagcccgcgccggagcgaggcgggtggcgagcgggaccggagacatcgctcgtcgtcgcaccgcgaacggagccggagcccgcacggccgggacgatgaccggcaccaccggagcaggccgcacgagcacgagcgcgaggctggctaccggccacgcgagggcggtgtcaagcgcgagcagcgctcgcctcctgcctcgctgccgtacagggatgactacaggtctggtccgccgcccgcgtcatcgtcgtcgtcgaggccatggagcgaccggccgcctgtcgggcgcgatgaccgtggcggccagtacgacgaccgcgaccgctacgatatccgggaagccgggccgtcctcccgtgaccctccgccacacgcacgtggcggaccgccgccattccgcgacggcccgcctcccggcacataccatgaccggccgtcctcctcctccgcgcgtcatggcggcccgccaccggcgctgccgaacggcaatggtgggagcggctggcggctcgatcggccgtcggcctcgagcttgaacgacacgggctcgcgcgggcacgccgatgagcgcaagcctgcgccgctgagccaggccgacgccgatcgggcagcccggctatcggccatgtcctccaatgcgtcaagcatgggtgcgtccgcctcgctttccttgaggtcttcgtctgcgtgtcgctgaccttctccacttcccctgcctgcgcagactcggaccgagcagcccggctcgagcagattcgcgagcgcgatcgcgtcgccctcgaactcgagatggcccagcgggccgcgcttgccaagacgggcatccaggctgacgtcgtcaagtcgatgcagcgcgaggccatctttggcgagggcgcgagcctcgaggggcggcttcgggacgctggcaagcgcggcggcgcccgcggcttcgattgatcgcctgctgtctctcttcttcgagtggtctcgaggggcacctttatctgcatgtttctgtactcgcctcgctgctgttttcaagccggtgtcgatcgttgagcacctctgtcggctccagtcgcatcgtcgacgtcgtcgtcagtgctgctgcgcgggaggtcgaggcttcaggcggcctgtctcaacaagctctccttctccctttgcctctcgacctgaacctcaacctcccttagagcagactctgacagagatggctgcactactcctcccgctcctcgctctcctgccggcagtgcacgcgatcccgagcgtgcttgtctacacccggacggcaggtgcgtcgcttcctcctgaaccggaggctcgacctccttcagatctcctgtctgccgagcgctcgaagagtcaggtctgctaggactctctagttgtcacctctgggtcatctcttgaatcactggcgtctaccgactgttcagaggtctcagtcgcccttcgaggtcgagctgcggcagcaagaccgtctgagtggctttgagcctcttcgcccttctcacccgctcggctcctgttaggccctcgctgacctcttcaagctccccttccgcctgcaggctaccggcacgactcgatcccgacggcgatcgaggctctccgcaaccagtcgctcccggttggcggcagctactctgtctcctttcagtttagtgaggacccgactctcttcaccgcgagctcgctcgccggattcgactgcctcatgttcgtcagcaactcggacgagatcctcggcctcaagcagcaggaggccttcgccgactatctcgacaagggcggcaactttatggccgtccactcggcctcggccgcactgttcaacgcgccggcgtacggccgcgagctcggcgcgtactttgactaccacccgagcctccaacaggcggtcagtctggcctgattattcgtcggcgagtgagctgcttctgatgcattcctcctctcggtcggcagacgtttgaggttgtcaacacgacgacccacccgtcgacgcagatgcttcctccacgctggacgtttgtgcgtctctcgtcggtcgacacctgttctgcactcgcgccgaagcgctgatcctcgccctacttctctttctgcaggaggaggaggtgtactaccatcggtccgacccgcgggcgaacggggcgacgctcctcttgtcggtcgacgagtcgtcctacaccggtgcgtactcgcaagcaacgaggcccgtcccgttttgatgagaactgacggacgccctccaattcatttctcagacgacggcaacagcaccgggtactatgggtacggtgacccccacccaatcggtaagctcgcctgctgccgtttcacaatctccgccgtttctgagctgacgaccgcgtctcgctcacccttgcaccagcctggtaccaggagcgaggcaacggctcgaacaaccgggcgactgccggccggtcgttctacacttcgctcgggcacaagaacgagacgtggcgggtgcgtcaccgaccttccgatcctgccagaaggctcccctccctcttgcagccgaccttccctctagccccccaacgctgacgtctacctgcctctcttcgctaggacccgctgtttatgggccacgtcatggagggcctcaaatggacgctcgagtctgggacgacgcttgcgtttgcaaagaacggctcggtcggcaacgccaccggtcgggtcgagtgcgtcctgtcctctcctctttctcctcttcccgctttctatctggcctctagtgagccgttcttggacgagagctgacgtctgctgcctagcatcgcatcgacgaccgcctcgctcccgacgactccgacttcgtcctccgcctcctcaccacctcccggctcgtcacccagcggcacatcggccgccgagcctgctatccggcttggcttctcgcagggcggcgtcgggctcggcttgctcgtcggcgctggactcgcacttggggttgctctttgagccacgggagcaggttaagtggcgagcgcgcgcagggtagaggaagagggacgagaagatcttattttgtcttgggacagaaatcagttgctgctgcttcattgtctgtgccatgagcgccctgaacgaatcagtcggaggtgcagccggccgtgcacggtcgtctgtcgctgctgtcgctgcggcccgcgccgcttctggtcgggcctgccgcgctggcgagggaggaaagaaggggcgcgcgcgcggagagacgaggcgaaaacggccctccgccctcggccctgtccacaccaccgcctccttcttcctccccgcccgtccctttcttcctttttcagacacctcagacgccctccgtgagtcttcgatgctggctggcagaggcgagcgttcgtgatcttgaaggagcggcacgaatgcgggttcggggtgtccggccatcgagagcggcccggccgcctcagctcctccgctgctcaaagggcctcgcctctcgacctggcgctgactcaagaacgatcctccctcctgcctctcgacgctcgttgtccgcaccttctccaggctccctagattcttcccagggcagcccaggcaacctttcaccttccgctctttacttcgccggccgacgctcgtccgctcgcccccctccccaagcgcccgtccttcaacgcgcgcggcccacgtcgtccctccctccaagcacccctcagcgtgagtccctccttgcagccttctcgaagcagtcgccttcctcctcctctctctagcgaacgcttcaccggcatcatatcgggcagaggatgagacgagggtgttgtcgagttggcctggtcggcagggcgccggcgggcgatcgagatccggcggcctccatctccccctctagggctggtcgacggccgttcgtgcgctcggtctgcgacgcacagagtagcctagtcgtcgtgagggctcgcaagggctctgctagacccgcagcgactgcggccaccgcttgcgccggacttcgagccgggcagaagggcgagccagccatgccgggcaggcgagccgccgctgccgccctgccatcgttcgacgagctcctgccggcatccctctggccttcctcgccactgtttcgaggctgcccgagtcgtttaccgtgccgtccgaaagtaaagaggctgaccatcgtgctcatcttcgcttcctgcccgcccttcgaaactgcgacggtcgacgacgctccttggatcgtgccctcctacccgcgcgcgcctcctctgccccgtctcccagtcgacgcacactcctcttcttccgcaatggcgaccgatctccgcgtgggaggcaagtaccgcatcggcaagaagattggatccggctcgttcggtgcgcgcctcttcttttctggccctgcttcggcgatagcccgtggccacctgcaaaggctgactcgtttcgctcgccctttcctttcaggtgacatctacctcggtgtcaacatcgtctcgggcgaggaggttgcgattaagctcgagtcgatcaaggccaagcacccgcagctcgagtacgagtccaaggtctacaagtcgctcgccggcggcgtcggcgtcccgttcgtgcggtggtttggcaccgaggttcgtccctttcacgtccctcgcacagccccggtctggctgtcagctgacacgcttttgccccggcagtgcgactacaacgcgatggtgctcgacctgctcggccccagtctcgaggacctgttcaacttctgcaaccgcaagttcagcctcaagacggtccttctgctcgccgaccagctcatctcgcgggtcgagtacacgcactcgcgcaacttcatccaccgcgacatcaagcccgacaacttcctgatgggcatcggcaagcgcggcaaccaagtcaacatcatcgactttggcctcgcaaagaagtaccgcgaccccaagacgcacctccacattccgtaccgcgagaacaagaacctgacgggcacggcccgctacacgtcgattaacacacacctcggcgtcgagcagagccggcgggacgacctcgagtcgctcggctacgtcctcatgtacttcctccgcggccagctgccctggcagggcctcaaggcggcgaccaaaaagcagaagtacgaccggatcatggagaagaaggtccgtcgtttcgtcgtctttgtctttcgctcccccttgtcatcgctcgctgacacgcccgctgcccgctgcagatgacgacgccgaccgagctcctctgccggggcttccccaacgagtttgccatctacctcaactactgccgctcgctccggttcgacgacaagcccgactactcgtaccttcgcaagctcttccgcgacctctttgtccgcgaggccttccagtacgactacgtctttgactggtcggtccagcggtccgaggacgaggcagctaaggcggctgccgctcagcagcagcagcagcaggcccagcaggttcagcagcaggccgtccaccagcagcaggcccagaccggtctcccgcgcccgcgccgcgtcgtcggtggcgagcagcacgaccagcagcagcagcaggccgacgagtacaagccgacgacggaccgccagctgcgctcgcagaccaaggcggcggccgtcccgatgaacgcgtcccccgcgccccggcgctcgacccgggacgacggccagcagccgcagcagccggcccaggcttggtactaaagcgtgaccggacctcggcttcgatccggacggccttctcggagacttctcgtactcttagattgacgtcagttgttgccggaacattgtggctcgaacgtcaagctgcggccggcctagttttgagcggcgagcggaggcgtgacgcagcggcacgggcgacttttgtacgagcggcgacggcgtcgggcccgattggaacccctgtcgaggggtctcgtgccgttgctcggtcgcttcggtcgctcaatcgcgcgcgcttcactgtaccaccccgcaaaactcgcaactcgtcctcattctcgggcttctcataccctataccctccgggcgcctccttcggcccgccctcatcggactcttttctctcgcctctcctctcggtcaagccgctcggccgaccgcccgcagtcctgtacccccgcggccaagccctcgtcggcgctcgaccaggggctggctcaagtttcgcccacctgtataatctcactccctctcatcaccaacctcttctcccaggcatctcctcctccgctcctggtcgcaacctcaagacctgtcatctttttgtacgcactcggcgcccgccctgccagggccgccacactccctcctccgcgaccagaaccccccccccatcgggacctacggtccgcgccagttccttactctcgtgagtcggctgctctctcgcagtgacgtcgacaatgtgctaaccgctatccgtgacacctgcagcacccccggtttgacactcgatcgcctcaacaccagatcgacagaccggcgggcagggcagagtaagagggcgccaggtccctcaccatcctcccctgacaccaccatccacctccttcgaacgcgccaaactgccttcttgccgcggtcgtcggctacgcgctcgtgatccggcacgccaactcggcccgactcggtcgacctcgcctcgaacgcactggcggccgccctccatttgtcggcgccggccattggcgctcgctgctgcgccaagcggccgagacggcgcgcgcttcgacccaactcctcctcctcctccacatcgtcctcatcgcctatttactttctttccagcacgctctccttacaaccaaccctcctccctcgtcaccttcctggcgcctcgtcgcgctcacgagggcgacgtcggtccccgagagccagtcggattaccacccgcctcctccgcctctcgcaccactctttgcatcacatgctcgatccaacacagcagtctgtcgtgaggcagggaggaggagggaagtcagggctaactcccggctccgaactcggcgatcgccggaggcgacgcgtgggctgcaagccagtcagaccttcctgccttcgcctccgacgctcactatcctcgtcagctcccaaacggctcgagtcaccctccgagcgaccttggcggcagcaggtagtcaacaggctcgcatcctcgtggttccttgaagaaggcagaccggcagcactccaagctcgagccgcatccttcagcacctcgcctccctcccctttctccacgtccgcatcatgaccgccggcgacttctctgccgcctcgctcggacgactcggagtccacacgatcgtcctccgcctgacgccgttcatcagcctgtttgcgctggcgacctcggccctcctcctcgcgctccggcaccctgaccaggggcgcatcgcgcttccatccgccgccgacaacgacgaggctgagcacgacccgtttgaccaggtcgatcccgaagtctgggaggatggcgtcccgctcgccgacgacgccttctggcgccggacacagctgcttggccggctgccgttgctcggccttagtctcgccgcactcgccgtccggtcggcgctctttgtcctcccggtcatcgcgggcaaccgctcgacgaccctgccgttactcgccgacctcgtcgctatcgcgctctacgtctggctcgttgtcctcacatgcagctcgctcccgcttcgtgacgtgccgacccactggcggacgctcctccatcaggcgagcctcctcggggccgtcaccgcctgccgcatgctcgagctcctcctgccagccgacgctgccgatgaggctagcccgtacgacgacgtcactctccgtatccttcgctatgccgagctcggctgcttgacggtgcgacctctcggcctgccctgcatcttgatccctcaaatgtgtctgaccctttgtcctcccgtgcgcagctcgcgacggccgtagccgtctccataccgcgcgggccggcgctgtacttctctctcgacaagctctacccttcgaaggtcgtggccggcgcgctcgccgccgagcagacgcacggtcgacggccgaacgtcagcggcgagtacgacggcaacatcgtctcgcaattgatgttcggctacgcgacgaagggtccatcatcgacagcacatctgcccgtcgtgaatcgagtagctgacttgcttgagcttcttacctatgggcagtcgtcactatggccggcaggtccgagacactcgacgtccaggatctgcctgtcgtcacgtcgagcctgcgcgcgcaaccgctcttccagcgcttccggcgccggtacggctcgacgcagaagagccgcctccacaagcgtggctcgggctggaccgtcctctacaagctgtttcgcgccaatctctttctcttcatcagccgtgagttccggctgcagatcggaaattgcccttggctgaaggctgaccgcctctcgcatacccgttcaccagagtctcttctcgcgagcatcacggccgtcctttactatggcccggccttcttcatcaatcgcttcgtctcgtacctcgaggacgatcctgcgcgcaaggacacccgctggggctgggtctacgcgtttggcctctttgccatctcggccgtcaacctcatcctcatcggtctcctctggtcggtctcgacgacgcagctcgagctgcgcatcaaggtccagctcaataccctcctctttgccaagacgctcgtccgcaaggacctcgccagctcgtcgtctggcaagatctcagccgacgtcggcgagaaggcagccgaccctccgcccgatggcgcagatgacaacgaggacgtcacgagcaagagccaggtcatgacgctcatgacggtcgacgtcgaccgagtttctgagtttgccatgcacttctacacgatcgtgcgtcgtctctctgccgatgtctgcatcgaaggataaggtctgatatctccaaatcaactcagatcgatgcgccgatcgagatcatcgtcggatcctgctttgcctaccagctcttgggcgtttctgcccttgtcggcctgctggcaacctgctgtacgtcgactgcgtcttcctgatttacctttcgcggctgacccctcttctgtgacccgcagtcgttcttcctctcaaccacctggcgtccaagttcgtcgtcgaggcgcaggagcggctgatggaggctcgcgacgagcgcactgccctgatgaacgaggtccttcaaggcgtgcgtcacaacgcccttgcagctcgagccggccgtcccgcaatcgctgacgattccagccaccattctctcctttagatgaccatgatcaagttcatggcgtgggagcgctcgttcgagaagcgcatccagacaatccgagagaaggagctccgatggcagaagcgtccgtcgttcggtctctccctggctcgctttgctcgactgactttccgttccttaattcccctcaggcaactacctcatcgaggtcggcttcactgccatctgggctgctagcccggccattgtcatcgtctccgctgtacatctaaccgatcgcactctggccagaagctcgaactgatcatcccggcccgcccacagttcttcgattatgtttggcggcgacagatgcctcttacgccttccgtcgcctttacggccgtcgctttattctctgagcttcgcttctctctcaacgccctgcccgagacgttcatcagcatcctccaaggcttcgtatcgctacggcgcattgagaaggtgcccactttgcgttggccggtgtcctcatccggctcacagccgctgacgctggcggcttccttttgcagtacctcgccacggccgaggtcgaccggcctgcgcagaccgagtcgggctcgaataaggcgagtcaacttgtgcggttcattgtcgccgaacccttctgaccaacgcctaagggcttctctagatttttctcaactcggccaccatctcgtggcccaaggacaaggtcaccggcgagacggcggccacctcggcaatggcgacaccaaagactgccttcagcctgctcgacctcacgctcgacttccccgagggcgagctctcgctcatctgcggccgattgggtatgtcgccgtcgacttcatccctctgcgggagccgcccaactgaccgcattttcttggcaggctcgggcaagagtctgtttcttcttgccctgctcggcgaggccgacctgctggccgggcaactcgtctgtcctcggtcgaagctcgacgtcatgtcaactttcagcgccaatgcctccgagagcgactgggtcgtcaaatccgtgtcggcttacgttcctcagacggcctggctggtccgcgtttgttgccgctcatcgaacccaacttctagctgacattcttgcctctccggtctctcagcgcaacgcctcgatgtcagtaccgaaggtcctcttgaaaagcctcgagtctgcgcagctgacctacttccttgcggcttttacagcaaggacaacattctcttcggcctgccgctccacgcgaagcgctaccagcaggtccttgacgcatgctctctgacgagcgacctgcgtgtgcttgaagacggcgtacgtcgtgaagtcatactgaaggccctctagagccttggctgacgggtcgaacatctgcaggacgagactgaagtcggcgagagcgggctgaacctctccggcggccaaaaggcgcgcgtcagcttggcagtcagtgctcaagatgctctactgaggatcttcgacctctgctgacaggcgtacaaaccccttccagcgggccgtctattcccgagcttccatcctcctcctcgatgacgtcctcgccgctgtcgacgctcacaccgcgaagcacatctattcgcgctgcctccgtggccccctgatggagggccggaccgtcatcctcgtctctcatcacgtcaagctttgcgcgcccggcgctgcgtacgtcgtcagcctcgacaacggcaccgtcacttacagcggaccggcgagcgacttcatcaagagcgggctcgacgagcaggcgtcgcaggccgactcggcggccgtcgaagaggccgatgaggacgacctgatcgaggagctcgccccgttcgacgagaaggacgacgcgtccgagcctgcggctgagccggccgagaagaaggctgcgccccggaagctgatcgaggacgaaaagcgcgctaccggcagcgtcagccgcgacgtctggctgatgtacctgcgggcgtgagtgcctcttgcgccttccgtctctttcgcagccgacactgctgacttaaccctgatcgtgccccttcatgttgtcagctgcggcggctgggcgttctggcttatcctcggcatcgcgctcgttctctcgatgttcacgcccctgctcgaaaacggatggctgcggcactggtcgagcagctacatctcgaagggcctcccgctctcgcctctccaaggcatcggcacctacctcctcgttcgtccatcccttaccctcgttcacgcctgtcaccggccaaattgacgaccgattctgcagataacgctcctcggcgtctgtctcgaggccctcacgtgctttttcatgtacaagggcgccctgcgcgcctctggctcgatccacaaccgtgcgtcacaagatgaatcctgtgaaactccatcttgattcagactaacgacctccgacctcgcaggaatgctcgaaacggtgctacgcgcgactgtccgcttccaccagaccgagtctcgcggtcgactcctcaaccggttcggcaaggacatggaggtacagcctcgggggcgctagcagtcgcagacaagtcattgagctaactcgttctcgccgtctcgtagggcctggactcgtccttgcctgacaacatcctcaatacgatcgtgtacgcgctcagcgtcacctctacttttgtggcgctctgcattgtcgggtacgtaccttcgtgcaaacagatttggacctgtcgccagagctgatgcacagaccttgatccgcttgcagtggcttgcccttcatcgtcgctactacgctgctcggcaccctctactggaaaaccgcgtctgtctatggccaggcatccagaggtgcgcagaaaggattgtatgaccttagtaggctagaactgacctcattgtcctcgccagacatgcgccgtctcgacagcgtcacccgctcgccgctttacaacctctacggagagactaccggtggaatcgcagtcattcgcgcgtttggcgccgccagcacgaccctctcgtcgatgttccagtcgattgactgcaacgtcgtgacgtcgtactggatggtttgtgccgatatcgctcgccgggtttgagcggatgagctgacacgctgcactgctcttttccttgcagttcacggtcaaccgttggctttcggcgaggatgaacctgctctcgtccgccgtcctcggcgccgtcgcctgcgctctcattctctcgggctcttcggcggctaccgcaggctttgcacttggtacggctccttcggagccagccgcttgcccatctgctctgactgactccgtttctcaaccctggcagccgtcgccaacaccgtctcttacaatctccagatggtcatccggcgctggacgtcgaccgtccagtcgatggtcgccgtcgagcgtgtcaaagcctactctgagctgccgctcgaggcggccgagtttgtcgagcctcggccgtcatccagctggccgacggcgggccgaatcgacgtcgaggatctcgagatcaagtacgcagttgacctgcccacggtgctgcacaaggtgtcgttcagcgtcgacgctggcacccgcgtagcgatcgtcggctcgaccggcagtggcaaggtcggtcctttcggcacctccgcccctttcgcgacctgacgaggaagaagctcctacctgatcccgcagtcgaccctggctcttgccctcctccgcctggtcgaggcccactcgggccggatcctcgttgacggcatcggtgagacgttcgctgcaccgacgtttgcggcgacgtgccggcgctgatcgattatgagccgcccgacagacatttcgaagattggcctgaccgacctccgccagaaggtgcgcccctgcttttgcttgctgcgactgggggagtgcaggcgctgacccaatcttgattaggctatcaccatcataccccaggacccgaccgtcctgtcgggcacgcttcgatccacgctcgacgttttcggcgagtatgagggctcggatggcgagatctttgaggcgctccgtcgggtccatctgcttcccagggacgaagtttcgtcttcgagctctgctctgttgcacgagtctgatgaagagaataacgccaatgtcttccacaacctcgacaccaaggtcagcgagagcggcgacaacttcagccaggtgcgtgctcctctttcgcatcgccttgcctgagctttcagccctgacgcctgcctggtcgtttgcacagggcgagaagcagctcatctgctttgctcgggctctcctcaagaagagcaagatcctcctcctcgacgaggcgacggcctcgatcgataaccacactgacgagctcgtccaaaagacgctccgcgaggagttctccgactcgacgttggtcacgatcgcgcaccgcctgcagaccatcatcggtgcggccagattcgcgccggaccctgcctcctcccagtcgcagctggctgactgcactgctccgttccattctgtgcagattacgacaaggtcatcgtcctgaaggagggccggctgctcgagcacgacgccccgtggacgctgctgcaagacccgaactcggccttccatgccctctgcgaggcgacgggccccgtcgagttcgcgaccctcaaatcggcggccaaggctgcgttcacttcgcggccctgaccgtagcgcgccagcgagtcgtagatgagaatgaggcgtcacacagctcccgcccttcaggccgccacccgcttcttcttctttgagccggccttctcgagcgtgtcatctggccggcgtttctccttgctggctttcgccgcctcggcaatcttccccgccagtgtcgtcaggggtcctccgacgacgtcacctgacgcgtctgcctccgggacctcagtcgcaggcggctcgtcagcagccgctgcccgcgtctcattacggctctcctcctgaagagcccgccggtgctctcgcgccttcgctttggaccgcttggggggtggcggaagcgggacagactggtacgtgacgtgctgctggccggcgagcgcagacagcggccgagtcgacagcgtgatccgcatgaagggcgtatgagccatctttggcctgcagcggaagaagcgcagagacattgctggtcagctctgtatgcgagattggccaggacgggctcagcgacgcaccctgcctgtgactcgagcgcgctcttgagtcgctcgaacgcgcggttcgcctcgccgacgacgtcgcgctccgactcgctgccgcgcgaacgatactcctcgagatcttcgagacagcccgtctcgttgtattgccagagaccagggagccgctgcggctcctcgagctcgcgtcccttgcccttgacgagtctggcgctgtagagctcgaggtaggcccgcttgacgttctcgacggtcgagacgagcatcgggatggtcgctgtcgccggcgacttatgatgtttggccttggagccgtcagccggagcagctcgcgtcgtcgccggagctgaggccgagagtagaggcggcagggtgtgtaagacaagcggtcgagaggggttctcctgcggacgacgccagctcaggacaaggtcagctcgagctcccctgatgccaaagccgccggaggctcgtcaggaagacgcacctgcaagaagcggagggcaaattcgcgatagtttcggattttgccctgggtcgcaatacgcatgagatggggctctttgctcgcagctgagccggcaacgacaagaggagcggccgacgaggaggaggcctctgacgcctcagcggcgggtgctgaaggcacggggaccattagcaaggtcggaagcgtcggcgggcccgcctgagcttgcgactggatcggaatcggcgagctagcggcagctggcggcatggcggagtgagaaggcagtcggcgtagtcgacgaagcaagggtgcgtcctggccggcgcgtccgcgcgcacggcccgtctcctgagcggcgagccataagttctcgagccacgggtccactcatgcagactaagcaaatcccagaagaaatcgtctttattgtcacaggtcggtacaaaaagtcgaagaggttgttgcagtgtacagagcaggcctctcacaagatggatggcgatgcgagccgcctctactgccgctggtagcccatcttctcgcgtgcgtagccactctgctccgccgagacgccagagggcccgccaccctccattgcggtgagctcgtagctcggcgggtgagccgccggcgccggcgccgtcgatatcgatgcgccctgctgggtgagctgctcctgagcgtcgtaatagtcggttgcgcccgacgtgttctgcagcctgaccggcgcaggctgatagacgctcgggtgggtggccgaaggagctggcgtctgcgacggctgcggcaggtagccgccgtaagggtcctgggcggcggccgcttgcgagggcgagacaaagcccgcctgcatcgcccggcgcgggtcgccgccaacgggcgacatggtcggttgaggcgtcgcctggccgtacgtcgcaatcgcaccgccataagctgcgttgttcgagaaagagttgtggtagtcgtcctgctgcggcgcgtagcccgaggtctgcgagtgaggggccgagtcgtaagggttcgtgtagatgtcgttctgatggtctgcgaggcggcacgaccagcgatggtcgtcagctgaggcccgtgatgtggaaaagcgaggggaggacacgcacagcttgtgtctgctgcgagggcagggtagccgccggggctctgctgtccggcggcataataggcgtcgctcgactggcgatgcaagccaggggcgaccatcggctggccgtaggcatccagcccgtttccgccagagccgacgccagctcggaagccgccttgagcatagctctcgccgtggctcatagccgagcgcgggtagccgccaacgaacaacgggtcgggctggtcccgatatgcctgcgagtgggcgagcgacgggtcggccgcaccgtcgtcctcgtcaagccactggtcgcgcgtcgtgttgagcggctgcgactcggccgcgtatggctgaaagccaggcagcgagctcccattcgcgttcgcagcgagccggcgagcgtcctcgctccgcatcgcctcgaggcgggcctcctcggcgtagcgatcgtcggcgtccatgcgcttgccccgcgcaccgccgtcagggttgcgcggcccccgccccgagatgcaccgccggccgcaaccaaaggcgcagcccgagaagacgaggcaggcgaatccggccagcgtgagccagacagctgggccaagcgaggacgatccaccgatgccgcgaatccgcgtccgggcgagcaggaagaggacaatgtcgaaaatctggcgggcgacgagcgagtgtctcagcagggactcgctatgcgtagcgcaagatggccaggggaggtgctcacaaaggcgatgagagctgaacaatagacatgagctcgcacgttagcaagcagagccaggcctgaagctgagcggacgtcgcccacgcaccgacagacgaagcaagactggccgagaacgtcgacaggcacgtcatggcgaacttttggcagtgagcaatggctccgagtaccgtcgcgagctgcggacaggcaagggaatcgcgttgacgagtcagacacagtcgcagggagttgggagctggaggcaatagcgggcagcaactcacagcagccagcccaagagctagcgaaaaggcgtgcgtgtgcatcagcgtccagtcgtctgaagtacgtctgcaacggatgcgtgtgactcaccgacaatgtgcagcacgagcacgtacgtcagccacttgccgactacttgaggcaagttgacgatggggatgttgagaagagcgtcgaggtctgagaagcgatcaccagagccagtatttagcgaggcgctctctgagagttgcaggccatgcaagaacggaccaagatcatagccgacggacggcgacgagcacgtttgggtgcctccgacgttggtgcagtagcctgcgatgggtaggttgctagaagtcaggccctagccatgtcgtgctacctcacgaatgaatgccagctcaggctcaccaagagtgcccagatcaatctttccggtgaagccagtggtgctgatgttggccctaaggaagtacagctgcttgatgagcggcgtcgagaacgaggcgagtgcgaggcaaacggtcgccgcaaggcaaaggacggtccctggcgtggctggggccatgacgtcgagagtgtcgggtgagagagggtagcttggaaggaagggagcttgctatggcgttcctggttgacaggacgcggaggcggagagctcgagaggagctggttaagaggtggcgctgcggcggcggcggcggcggggccgaaggatgggctgagctgagctgcggccggcgatggacagagggtgccgaggaggatccagagaccgctttggaaaggagtcgagggtctggatgatgacctgcagatgaaggcagggagtgaagatggtcgtcaacaagaggcgagccttgggcgccaggcgaggtggtgacccgcctcgcgctgcggaggcaagtcggaggcacacagccgagcagggcgagcagctgcgggcaaggtggagcaggcaccgacggcggtaccttgcgacgagtgcacaggcagcttcactcgcgaatatatctcccttgaccgctcccaataaggcaccgggaagtaagacgagagccttggcgagccagacggcaaaaagatagatccaaacgtgatttgaacacgtggccttgagaggtgtgcaagtcgagacgaactcggacagttgcaatctcacgctctaccactgagctattagatcttggatgaaagctttttagctgaacaatatatattctcaaaaataacttaggtgatgagtcatgagcgatgggtgatgcgcgttgaatgagcacagagttgaggaaggcgacgggggatggacgagcaagcccaagtgaagcagcggtcctgcatcaggccaggtctatctattgtgccggctgtccggaccggagccgaaaggagaggttggccagcagaagtgcctcggccgatcaatgcatcatcggctgccggtcagcatgtaggtgagcggtcccagtacaccctcgtctctcgcaagccccctctgacccagtgcacctgaacgccttgagaagccgtcgatccagcgaggcgggcgtagaagaaagcgtgcatgctgaatcgtcgttagttgtcgtgtctctgcaggaggggcccgcctcatcgcaggtcgggcctgaagaagccgcccatgaggcctggagggagcgagcccatcgttcccggcccgccgccgctgccgccgccgagccgggcctcagaaggcgggccgccgttggccgacttggcgaggacggtcgagcgcatgctcgccagctgactcgaccacgcgtcgagctggccgtagcgtgccttttcgacggcatgcctggagcgcagagggacgtaggggtgtcagcgaccggcgaggtgcttaacagtcgatggacgcaccctcggtcgagctcgagccggccgccgacctggtcaatcttgcctttgaccttgccgtcgaggatgagcccgacgagcaggtcctcaacctcctcggtcggcacgttaagttgctgcgaccctccaaggtcagcatctgagctctcacagccgacgggggagagtcgatgggaggcgcaccttgccgagccacttaagctccatccgggtgtagggcttgatgaggtcaatcaggtactgggtccggagcgagcgcaagacgtcgtcgatgtagcccttaatgaacgggtcgtcgaggatcgtcgccttgttctctgggatagcggcgcgggcgttgcataagtcagcagtgctcgactgcacgctggatccagggaagagggcgtaccgcggagaatcttctgggcatcgtggatgtcgcgccgctggtaggcgccgacgaggttggtcatcgcggcaatctcgggcgagttcttgtacctgcggatggggttgcaggcgggtcagcaaagaaggagtcagggcagtcgataaaggtacgcacggcttggtctcctgcgagtcgaaggggttgatgtcgctgcccatgagcatgtaggcgagaacgaggtacttgagcacctggacccgctgcgccgcgcccgcctcgtcgaactgcttaaacgactcgaaaaagtcggtcgacgcttgggcccagttctctgcggccgtgagtcagggacgggataaaaaggagtaggagaggtgaacctcttcgtcagtggggcagccgcagtcggagagacagcgagcgactgactctcgcccatccacatcttaccgccgcactcgcgaatgacgcccatgatgcgcgggtgagggatcgccgacttgacttcgaggcaggcccggtagagctccttgagccggcgcacgtcgccgagggccgaggccatctggatctcgagcgcgtagacctcgagcactgtaagagacggagactacgtcagctctcggatgtcgaggctagctagaagagggcgtcgacgaggaggactcacgtatcgtgcctttgctctggtcctcggtcgacgtgcccgacccttcgcccgtcggccggcagaactcactgagctcggccaagactggccggagtcgggcccactcgcgccggtcgagccagagcttcgctagcttgaggttggccttgacactcagacgctaaaggatggcgaaagaggtcaaggtcagcgagaaggacggggatcaaatccagcgcaaaaggcacgtacctcgttccggctttcctcgaggctgagtttcgtcacctcgtagaagcgctcgagcgtgcccgtcgtcgtctcgacgccaaagcccttaccttcgccgccgacatagtcgaggatgctgttgatcgacttttcggcgtctgcggggcgaaacagccagaatgtggagcgagcgtatcgagcagtgggttcgaccagtcagtaaagccgacagcaacgaagagcagagggaagaagggaccggcaatttcgcgtgacggcactcttcgtgtagccaagaagctcctcgtaggtcttaagagcgtcctcgggccggccgagcgtgcagaacagaagcttggtcatctgcttgagcgctttgaagcccctgacgtgtgcgcgcagggaagagggcgcaagcgtcagcgctttccgctctgacaatcgacaacctgccccaaggcagcagcatagacgcgccagtcgcccttctcctcctcggcatcgatgatcgctcggaaggccgtcagcgcctcttctggctcatcttcgactaggcctgcgagggggatcaaagagcggtcgaggcgtcagcatgctcgttcaggacgctgcggagggaggaggttgcctctgtagactgctgcctaatctccctccttcaacagctctcggtccctctcgcgtgtacagccgcgcgacccccctgagctctccaatgtgcatgcccacctcgaacagcgcagtacaatacacagcgccctagccctcccacctccgttgcgcagcgcacgaccgagagagagaggagaacgacgtacctttcgctcgataatacatgttctccgcgtccgcgtcagcctcggcgtcgcttccttcctggtcctcatcgtcgtcgtcgtagtcgagctcgtagtcctgtcgacggggtagaggcggtcaggttcgacttgggagagcgcaggcagccgggctaagtgaggtcacagccaagcgctcgcgacgcacctcgtcgccgtcctgtcgcgtcgagatcgagaggacgcgcataaccgtcagaactcagtcacctgaaagcgaggcgagccccgttcgcgtgcgagtccaagtgatgtcgatgagccgcgccgagcgtcaaacgtctcggatgcgctcggccgtctcgccagttcgatcgacgcgaactgaaaagcgatgcagggaggtgacgcacgtccatcatgaagtcctcatcgtccgactgtcgagcggacgacccaagtcggcggcagcgagtgtgatagaagtacgaggggccgacacgagtgcgaggtggagcaggagaagaggagcgagcgcgcgtgtcagccctcctgtgagctctgagccgacggccttccgtacgctccggtctgctggagctgtgggacggaccatcgggaacgcgttcgtccgctttgtgggtgaaaaggtgtgctgtcgtgatcggctggagtagggctggctgaagctcgaagggcagcgacgacgttcgaacgagggaggtgagggtcgagcgatcgtcagctctcccttgctcgccgtctcgcttcgtccgagctctcctctgctgacagttcgtctgtcgcaagctcgactgacctgtcgagagctcggctggtgtcgtgcggtcgagagcgagatggtcgtcttggcccgagactggcacgcgcagccctgtaggcgagacccccagggagagcccaggatgaacccctagacagccctgaaccgcccaagtcgcccaggtcgcccgccagcccataagcctgcccagctcagccctcgctctcctgcctcccaccttcatccacacggatgtcgaccccagaggactacaagcaggtcgcaggcggctcgctcaagctcaagggcggcctccagctcaaaaagtacgcatcctgcgcgggctctcggtgttggcggtcgggacgcgtgctgatcgctcgccctgcctcgcctgtcccctccttctctctcggccttgcaggaagaagaagtccaagacattaaagacggcaaaggaggaggccactgggtcttctagcaccggcggcggcaccggctcgggcggcggaagcggaggcggccggcgcaagaccgacgcggagaagcgattcgaggagatccaacgagagagggtacgtctcgtgctcttgcttgagccggagcagcggtggaaggagagaggggtagagcaggtccggatgagcgctcgcccctggtcggcactgtcggtcgctttaatgggagagcgccatgaggacgtcgtcttgacgaatactcccgacagcctacctggcgactcgcccgtcgagcgggagtactcgtccgcgcacttcgtccctcggccccaccaactcgctaaagcatctgactcgctcctactcactcacttgatgcccgcccgcagctcgccgagcggatcgcaaagaccgccgggcagacgcacaaggaccgcgtggccgagttcaacgaaaagctcgagggcctgtcagagtacgtccggcccttgcgctcgtctgccgctcctcttccctcgctgcctgtccttggagcgttgagggggtgagcgacgccgcaggctgcttattaggctcgctcgcttgctcgctcatctcaaccagcgctgactttccatctttttcttttcaggcaccacgacatccctcgtgtcggacccggttaacagcccttcggcttgtcgaccctctcatctacctgtgtactttttcctggcctcttcggcctctctcgtatgttctttcctggaattcgtgtgcgccgcaagcagcacaggactacgtagatggacatctcagacggcccagaccttgacgagcccatcatcccccgcgctcgccaacagcgctgtcccacgctgctcgtcctccgtcccggggagcaagggcgcaaacgcgatgctgttgacctctgcgacgccgtgggcttcttcgagctcgtgcgtgaggacgaggtcgattggagaggaggacgaggaggggtcgagccacttgcgatgaaggtagggtgtgaagagatgtcagcgacgttggtactttcctcgggcagagagagggcggcacgcacaacgtcgaagacgcggataaagccgtcgccgcctgcgctcgcaagcttgccgagcgatctcctcccgtctgcctctgcctgcgcagccgtcggccgagaggcaggcagccacgagagtgagtagatcgtgcgcgagtggacggcccggaaggcggttactgtccgccacggcgactcgacgtcttggcctctgaggcgggaggggaagaggtcagccgtcgcggagggcagtgacagagagagcagacgcacctcctctcccagaaccggatctcgccctcatcgcccgcgctcgcaagccagtttccctcgaccggctcaaacgccatcgtccagacggtccccgcatggcccttgagcgtctggaacggctcccagtcggcgagcggcgcgtcggacgagaggtggatcgtgtcgtcgtacgaggccgagccgaggaggtcgacgtgcgggtggaagacgactgtcttgacgtcctgggtgtgattgagcatgacggctaggcattcaaagtcggcatccggttggactgtaagtaccgccaatactcgtcagcgagctgcggaacgcaagagacgagaacgacgcgagcgcaccctcccaaacccagacgctcttgtctctcgagcagctcgcgagcagccctccgctcgcactccaagcgaccgccttgcactccgagtcgtgcccttccaacgtcgacacacactcccactcgccgctgttggtcgcgtcgtcggctgcgccgggcgaggcgggcgagcgctcccagatggagacggtgctgtcgaacgaggcgagggcgagcgagctgcccgagggcgaaaaggcgagcgagcggacggtccgcgagtggcctggccgagtcaagaaatggagtcagcgagcgtcctcgccgggtcaggtctggcacgcgggggacggaccagtcgagatggacccctgcgagacgaagcgcgcgtcggcccctcggccgttgaacgaccagagtcggaccgttttgtcggtcgagcacgaggcgagcagtcgctcggtaggtgaccacgtcacctgccatgcgcggtccgagtggcctggtcgtgagttaggcacgcgagagcgagcgggagtatgcgaagggagctgatgtcagctcgacgggctcgtgcaggatctcacgtctcgatgaacgcacctggaagggaggcaacgagctcgagcgaccgagccggctccggcatgctgaacttggattcgccgtcgacgagcatggttgatgatagaggaagcggtcaacaggcaggctgaggttcgagcgtacgttgggtggcggcgggtctggcgctgcgcgggctcgtccgccgacgtgcatcggaagcaccgctcgcgcgcgggcaggcagatttcgtcctgccagttaaaacctcgcctgcgcccttcaccctgccgaccacgaaaagatggtcgcccctgtgactgcccaacctacaccttcgaggtcgccagcaggagcagccaaggtcaagccgtcgccgagtatagctatcggcacgcctgcccgcaagaagcgccgcgagccaaagacgccctcagccgccgccgccgctgttcctgctcctcagatcaatggctcctccctgccgaagccgaatggcaaggccgccgccgctaccaagccggtagcgtcgtctccggcatggcagtacgaggtcgtcgccggaagcgccgtccccaaacaggcgcccgtcttcactaccaacgctgcgttagtcctgcctgctgggtcgtcccttcagcccactctttggtcgctgacctcctcgccctctttctccagccactttattctccctcacccgatccagcttcgtctgcactcgtcctcagacctctcgccgctgtcgaccatcacttcgcagcgcctgccgaaccaccacacggcagcgatcacggccgttctgctcaacccgctcaatagccttcagctcgtgacggcctcgctcgacaagactgtcaaggtctgggactacctcgacgggacctgcctccggacgatcgcctgcccgggcccggtcgagcagctcgtcattggccagaccggcgacgctaagggccgctggtgggtcagcgtccgtggcgagggcaaggacaagcgcaagcgcagcaaggacggcaaggacggtccgtcccgcttctatacctgtcacgctccaccagcgaccgttcactgacccctgtgtctactgtcttctttcatagctcccaagggcggccacctgggtccgcagtcgacgatctacgagctcctcgtgccggcctcttcgagctcatcatcgcccgtcaacgctcggcctcacaaccgcatcgcccgaattcggcacagcacggcgctcatgctctcgccctccggttccttcctcgttgtcctcgccggccagaaggcttacgtcctcccgaccgcgcccgaccggatgaccgagggcttcacgaagtttgtctcgcccgaggtcctcacgtgcggcgcgatgcacccccgtgaggactggttcgtatcgggcgacgagaagggcgtcgtccgcatgtggttctgcctcgctgagctcgcggctgcccagccggccggccaaggcgcaacgcttcacgccgatgacgacgacgcggacaaggagacggccggcacgacccagcagaaggcctcgtcgggttccgccattcgcacgacgccgacgacgacgctccactggcactcgcacgccgtcgcctcgatcgccttcaccgccgcaggcacgtcgatcctctcgggtggcgaggaggccgtcctggtcgcctggtcggtcgctaacggctccaagacgttcgtcccccgtgtcggcgggccgatcgcctcggtcgtcgtccgcccgcccggccacggccgcgaggaggagtggtgggttggtctcgccaacggcggccttcggcggctcggcggcgacggtaaaggcggtcgcaacgtcctcggcggctgggagtcggcccgaatcgagccctcaccggcgccggcgtccggccggccctcgccgctcgcctaccacgctgcgacccagtcgctcctgctcccctcggctcacccgagttcggtccagctctactcgcccgctcaccagagctcgatcctcgagctcgaagtcgcgccctcgaaccgcgtctcgcgcgcggccgacaaagaggtcgacccggttcgggtcgagctcgctgccctcggcacctcattcaacgagaccggctggctggcgacagctgagcgccgtgaagccgacgaggaggagggcgcggcagtcgcccggacgatcaaggtctggcggtgggacgctagcctccgaacgtacgtcctgacgacgcgtctcgaggcacctcacaaggccgacgtcggctcgctcgccttctcgcccgtgcccgtcacgctgcccggcgcggcccagccgacgctcctcctgctctcgacctcagccgccgacggcgtcgctcggctctggcgcgagaagcgcacgcgtttcaagtctggcaaagttgaaggtgagccttttttctttcgaccgccttctcctcttcctccctcgcgcgcttcgttgcgtaggagccggcctggcgcatgtcggccgcgttcctctcaaggatgatacaatattcaagctcaacagtcttaatcacctatgtggattaccctcttcttctttttacttctgatcccttctcgccctcatccttccctttcttccgatctttccctttgcgaccgacgctgactccttgcatctcctcccgcgccgttcctcctcgcgctcggtcgttcctccgcctctaaaggtacgctttcatcccgctctttcctccctctttccctttccctttccccctcaaatgattacaaaatatctatcaagctcaacagtcataatcatctctgttgactacccatacttctacattgtctgaattcttacccctcctcttctccttctcggctccccgcgtctggctcgaaacgtgtgctgaccttctttcttcttgctcccccgcgtgcttccgcctccgcttcggcccgctttaccgtcggccaggtacgtctgccttcctcctctctcccctctccaccctccttcggcgccgagccgtcaaagatgaaaacctatcacatccctccctcgcccgattgtctcatgacggcgcagggagttctctcaatcacccatgtggaccgtttttgttctgcaatcctgagacgctcgcgccctcacccactccttctttgccgcgacctcttgacctgacgctgactcttgcctcctcctctgctcgtccctgttagcctccttccagccactgagcctcctttcgcaccgcggcgcggcgatccacgcttcgagctggtcgcccgacgcttcagtcctcgctctcgcccagggcgcgctcgtcaccatctgggacccggctacaagcgtccttcgcggctcgctctcgtcgcccgacgtaccttcgatccacaaggtcgcctttgccggcctcggcggccgttacgtcgtcggcgccggcgcccgtaagggcatcgtcgtttgggatctcgtcgccggcgaggtcgtttggtcgtcgccttcgctcaaggttgagcacctcaccgtcaacggcgccgacctggccacgttcacgacggcgaccacctcagccccggccgaggcagccgagactacgtttgccgtctatccgctcacgtcggccaaaccgctccgcgtccggtccatccctcgtcgaatccgctcggtcgcgcccttccctctgtcaaccggtcctgccgacgtctcaatcctcgccgttgccgacaactgggacgtccttgtcgttggcgacgaggcctcggctgcgttcgacaccctctccttcgactcgacccaggcggtcgacctcaacgcggctgcctcgtcggccggtccaagcctgttcgacgagatctttggcgctcaggctggaccttcgacgccggcttccggcaccgcttctaccaacgccggccgccggagcgcagcacccaaaaagtggacctcgctcgaggagatctttgacgcctcggcccaggtcctgccggccatgtcgatggtcttcgacgaggtcctcgaccacgtcttgtcgaagcggtcctcgggcgacgacgagctggcagtggacgatgacgacgcggccgccgacagcatggacgtcgacgagcttctaccggacccagagacatcgacacgcgagtggcaggcccgcgagctgcccgcgtccgaggtcaccgaccttaccgacttctttaaggcgctatcaaccggctcttccccttccgatgctgcgcctccccctgcgtctcgactcgtcggcaagacgctcaacggcagcgcagcggcgactgtcacgcccgtcaaggcgacgcgagcggctgctcttcggagcaacggctcgacaccgatcatagacggctcgtcgacgttcgaggccgagacgccccagggctcgggcaaaaagcgcaagtccaaggctcagtagcctattgcgcgatctcatgtcttgctctgtcgtacgattcttgccctccgtctgaccgcgctcgaaagcccgtacgtccacgtgcaggaggagcatgagcatgagctgggctgctgaactctctcgtcggccggtcgagccgtcgccctcgttcgcctgcggccgcagcctcgacctcgcgctatgctgccctcgacctccgcccgtgcggcttgacctattcacggcccccaaaggtatatatgagctgctcggcagagagcctgccttactctcaacccccttccctccctcttagacgcggtggtcgtctctcgtcgccgctgccgacgccatgcctgatccctccgccgcgagcagcagcagcgtcgaggcccaggacgcgacggccgaatcatcccctcagacgttccttggcctcttcaagatttgccgccggccggcagcgtacgctcagggcaagacgctaccggaagatcgggtacgtcgacgagcgatgtcctgccgagctgggcagggtgacccgagctgactgaccgcttgaccggcccgctcctagtcgctgaacgtcatatcgaagctcctcttctcatggctcacgctgctcctgcttgtaggctactcgcgaccgatgagtcatgcttttcaaggtccccttcctatcggtgttaagaacgagctggagcggagggagggtcgattgagccccgtgcagcgagcgctccgacctccctgaccggcacgagccagacccgagctggctctctccacacaagctaaccctcaccttcattcctacttaatcgcaggtcggagctcgacgatctctggcttctcacgaccgagtactcgtgcgagcggctcgggaaactcgtccgtcttctgttctcatctgtcgctgcgcacggtcgacctcctggcctaacgcgtgcctcgccctcctcttggacagctcgagcagcacttcttcgagcgcgtgcctgaggccgagcgaccgctccacctccaagctggcggctcgtcgtctgcccctcgcgcctccaggcggcttccggccgaccaggcgacgctcaaggatgacgagggcgaggaaaacaaggatgtgttcgagctgccgacggtcgctcagtcagatgtgccggccgacatcagcgcagacgcgaccgttccgacagatccgaagaagaagtacgaccggtcgctcctgctcgccctccagcaggtcgtcctcttccggttaggcagcgatcagcgctctactcgactcccttcctccgcagctgaatctgccgcctctcctcagcttctggtcagccggcatcctcggcctctgcggctttgcgttccagacgacgatgccgctcgtcacccggcagatgctcaacttcatcaccatctcgtacaactactcgcacggtctgacagatgtcatcccgcccggcgtcggccgcggcatcgggctcgcctttggtctctgggcgatgcatcaaacgtcaagtttgctcatggctcagtttctccacaggtcgctcatcactgggcacgtctgctggcttcaagaaggctcctggtgtactgcgctgatcctgctctgacgtcgcagatttatgctgcgcgctgctctcatcgccaacatctcgcgcaaaagtcagcggctttctggagcgtgagtcccacctgcttctgaagttctgaagctatcgagcagcatgctgacgcaaggaccttgtcttctgtccgaacagatcccgcgccaagcacccgaacggccagctcgtcacccacatctcggccgacgcctccttcatggactggtgcgcgctgctcgcacacgagctctggctccagccgatcatgatcgccattggccttggtatcttgatccatactatcggctactcggcgttaggtcagtgaacgacgcgcctgagacgtccctacatcggagctgacctacagtctgatcgcagtcggcttcggcgtactcgtcatcgctgtccccgtacgttgctcactattcgctgcttacttcaaacgccagaaccaagggcgtttctctcgcagccgaggctgaccttttactctctgcgacagatcaacggctggctgatgaaccggctcatcggaacccggcaagcccgtgcgtccgactcttccctctgcttcctttgctttttcctgaccctccgttggcacggcagagatggtcattgtcgacaaacgcgtgcggctcttgcaagacatcctccagggcatccgggtgatgagtacgtcgctccgctaccctgcagtccgaccgccgctgatcagtctgcctttgcttcaccccacagagctcatgcagtacgagccgtactttgaggaccgcgtcatgacgcaccggcgcgaggaggtcgagaagctccgccgcaactgcgtcaatcgggcggtcatgaacgctacaatggcatctgttcgtgcgtcgcatcgtccccttactactgctgtcgcaatctcaaacgaaatttgactttccgtacgtcgtctgccagcggtcatggcggccgtgcttacgtttgtcacgtattcgctcagcggccatgagctcaccgcggccatcgtttttacctcgctccaggccttcaacaacattcgcacgcctttggcccttctacctctcgcgatccagagcgtctcggatgcttacgtcggcctccagcgcatctccaaggtgcttctcgccgaggaagtcgacaaccctgttccgatcctgcctggcgccaagtttgccgtctcgtcgcacgccaactactcatgggagacggcaacgccgctcgacgcttcgtcttctggaggatcagccggccgcgaccgaggcgctgcaaagaaggtgaaagctgccaagaaggcagcgaagaaggccgcaaaggacggcgttgagctcgaggcgaccgagaaggcagaggaagcggcgcccttctctctgtgcgtcctcttgaccgattcgtaccgaccctcatcgaccctgcccccccaccctccccccttgcttcgccacctagtctgacgactgactttgacctcccgtttggtgggcagcgcgtgatgccccactcgttcttcgtcctcttccgccatttcctccgcgtcgacggcgtcctcttccgcctccacgacgtccgcctcttccactcgtttgcctcgaccttggtcatccgcgagacggccggctgggagggcgcgtacgacagcgtccggcgctgcgcaatgccggcgccgtacgcgagcgacctgacgctcctgagcgacgagggctgggtccatcgccaactgagcgcggacgcaaggtgcgcgccggtcaaggtcgaggatgggcagaaagcgtggccggggctcgggaggacaatcgaggtgctcgatttggccgagctggcggcggcgagtgcacgagaggcgccagctgctgctgctgctgacggcgccagcgctggcagcgatcgatgaaggaacgactttctgctcgcctgcccttctcgtgcgcggacaggtgggccaggcgaggtggcgcgtgcacagggacgtcggcctaaacccgccggcgtcgagcccgaccaacgtcagtgtccgaccaagggaggagatctcaggacgcgagcgtcctgacccttctctctctctcgcgcacactctcacgaacggccacacacgagttgggggttcccaaaactcccgagctctcgctcagggcagctctacgtccagcatgttggggagtctgggttcatgacaatttcgtttcgtttttgaggggtcggcgtctctacgcgtccgcaaagaccgaggcatcgatgacgtctgcgaccttgagaatctgccggacgagctgcgtcgcaagcaggtactgctggcgctttgaaatcagcgggtcaaacacatgctgggcgcgcatgtcgttctggccacggcccatgcagtcgatcccgagccgcgagttgccctcctcgatctggcgcgccttcaccgaggcgagcgtctcgatcggcgagaggccagagttttcggcgagcgcgagcgggatcgcgtcgagcgcagaggcaaaggcccgcatcgcgtactgctcgattgaggggatctagtacggagggggaaggaagagcagtcagccttctcctgctcgcgcgcgcgagaacccggtaagcgaagggggtcgcacctcgtcggcagccttcgagacggcgatcgacgacgaaatctcggccgcgccgccgccgtagacgacccggttgtcgacgacgaggttgcggacgacgcagagggcgtcgtggagcgcgcgcttagcctcgtcgatgatctgcccgggacggttcgccgacaaaggcacgggttcagcgtcggcactgggcaagcaaggagccgggcgcgcaacgcaccatcttgtttgagccccggacaaagatcgtcacggccctggggttggcgcagtcctcgatgacgagcatcttgtcgcgcgtcgtgccaaagctgacctcgcggacgatgccggcgtggcctagcttgtcggccgtcaggtcctcgaagcgcgggacgatccggcccttggtcgcgatggcgatgagctgcggggaaagggggaggggggcgttgggtcagaatggactagggagccgggcgagctgcaagcggccgggccggcaacgcacctcaatctcgggtcctccgacccaacggacggccgggagctcattctgcatcagcaggtggttggcctcgtcgtcaaagccccactggcagatgacgaggttggcgccggtgtccttgaccctgagaaagagcaagcggaagcgtcgggtcagtcctgtggcacgacggggcgcttcagcgcagagcgacggccgtacatcttgatcatctcctcaaacttctccttctcgtagacctggagcttcttgaactcctcgacgctttcaatgtcgagcttgtgcttcgtcttgggccgcggcggctcaaacgggcacgtcagaatcgcaatctttgcgtccttgaccgagcgcggcatgtttgggtgcgacatatccttgtcgacgacgacgcccttgacgagcgtcgtctcctcgagcgaaccaccgacccggccgtcgaccttgatgagctcaaagtcgacgtcccgccgctcaaggtcggcgaccgagaggacggcatcgacggcaatctgcgcaaatttggcgtggtccttgctcacgctgagccggacggggagagagggggggtgggggtcagccactgctgcgtccccgagaacgacgtgagcccgcggacggacatcttcgagccaagcgaggtcatggccgtcttgaagaggttctcggtgttgccgacggcaaactcgatgacgtcggccgtcttgtcgagctcctcgaccgcgaccttgcaggccttctcaaagccgtcggcgatccggatcgggtggataccccggtcgagcagcgcctcggatgcgctcagcagcgcaccagccaggactgcgaatagaacgcgaagaagtgatcagcgcgctgcgctgcctagagaaggggcgccaaacggaggacacaccaacgacgccggtcgtgccgtctccaatctcgtcgtcctgcgacttgctgacctggacgagcagcttggcaatctgatgctcgacctccatctgctgaaggattgtcgcgccgtcattggtgacggtgatgtcaccgtcgggcgagatgaggatcttgtcgagacctgggagacagaggagagggtgagccggaggaacaaggcgacgcgcagggcggtcggtgacttcgaggggactgacctcggggacccagcgacgtcttaatgatctgttggacgtcggcagagacgtcgtcagctcttctcctggctagcctggtgactcctctctcccgtcccacaggaaggtcgactcgacggcagctgacaacgcgtcgaccccgccgaagcacgtcgccctccgacgcagaggtccttcgcctacggccgaccacgcgactcacgttcgacacctgcttggccgcgaggatatgcgactggaagcgcgagcagagcaggctgtcagcgagccgtatacgggacctcgaacaggccgacgagggcagaccgaccttgatggcctcaacgccctgaagacgggtcttcttgccctgctcgcgaacgatgatgaacggcctggcacggagagctcgtcagtaatcttggagcgcggtttgagccaaggaccggagcaggaactcaccgtccgtactgcaagaggccaccgcggcaagaggcgagctcgctcgatcagcatccctccgagccggcggcagctgaaaggggagcagcaaggagcagggccgcgcgcggtcgacgccgccgacgacaacggcacggcggcaccctctgctttccctttgaaaagagacgtacctcgtccgtcgtgtacacggcctgtccagggtccattccctgcatgatgagggtctgttttaaaggggggaggagaagggttggtgtggatgggtgtcggagggcgatgcgagctcgaagcgtctcgtcgaaaagacgcggcgcgggcgcgcgagaggcgagaagcaactggcctcgactgccagacgattataattgagctctgacaaactgtggtccgccgactcagcctcgcctcaatccatctcaatccacctcaatcgaatccgtgccggtcaaaagttcgcgcgagctcaggcgcagctcactcattccctcgctaacgtcgacggacctcaagtagcggccagcaagcaatgaattcgctcccaccccggccgtcgttcctcccgggcccgcctcaggcgtcaactagcagcagcagcaacggctcggccggtcctggaccagcagcagcggccggtctcccgcctcgcctgacgcacgcccttccgtcgaaccctgcgtacggctccgtcggcggcggaccctcgagcgcctactcggcatatgcaccctacggcggtggaggcggtgggccggcatacatgcctgcaccgccgactggcccaatctactcagccagcggcgtcaacctcgccgcctttggcggaggctatggcggctgggccggtgccagctctcagcagtcgtggacggcctacccagcagcggcctacccggcttaccctccgccgtctcaaccagcgtccctgccgtccttttcgcagcagcagcagcagcccgacgccgggccgtccgtcccccggccgccgcgcgccaaggcgcccaagctcgacatgaaccgcatcacggcggcgccgatgcgcaactgcgcgctcagctcgtgcaactttctcggcaccgtcaaggacgtcgagctccacgagatggaccggcacctcatctatccgccgggctatgtcgagcgcaaaaagtcgaggccggacgggtgcgtctggggcgatcacgacgactaaggcctgaaccgaggggtgactgatcgcgaccgctcccttgcagaccggtgagcgcgatccagttcaaccgcaagctcgagaccgacgagcagattgcggcgtggatccaagagcgcaagaagaagtggccgacggccgagcgggccgccgacaaggtgcgactgcggcacacgctctcctctctagcgagcgcgatcaactgacgacttgacccttcgcgacccgtctgcaggaaaagcagcgcgaggaggcgctcgctcggggcgagatcccacgtgacggctcgggtcgtgggcgaggacgtggccggggccaggaccgcggccgcggacgaggcggcggcggccggggcggcggccgcggtagctttggagcgggccagggcttccagccgaaccgcgaccggccggacggcggctacgggcaggtcggaggcaagggcaaggagtgcgtcagcgcacggagcgtcaaggtccgcaaggtcggcgatggggccgacgactacgactcggacccgctctcgtcctctggctcgtcgtcctcctccggctcgtcctcctctggatcgtcggacgacgacgacgggcctcctcgcacactgtcggccaagcgaccgcgtgcgccatcaagtacaggctccacgccggccctctcggacgcagacgatggcccgcccgtcaagctctcgactgccgctctcgcgccgcaagcgtccgaccggccgccctgcgtctacttctcgcggccacggggctgcaatatgggcgcgaaatgccgcttctcgcacgacgtcgggcccgagtctgcccgcccagcagggacaaacccgcacgcgctcgctccctcgcggctcccaaaggccgtcgcgccgcctgcagcagcgacaacagcgggcgcctcgtctggccggccgtcgctgatggagcgcctgctcgagggcgaggtccggcacacgacgagcgcgctcgcccaggttatccgcttcctgtgcgacaatgacctcctgcgcggggtcgagctccgtgtcggccaggccgaggacgaggcacgcaagggtgtaaaggtcgttcacgtcaccgagctcgatggggcgcttgctcaggaggacgccgtggtgtctggcgacagcatggaggtcgacgcccctgcggtcgatcctgcagtcgaagcgatgccatgagcccctagtcaacgaacgctctcccttctctgaaaagaaggccatggggatctgatcgcggcgagctgtgcgctcctttcatgcgagctctggtgccgcagtaaagcaggccgggcccttgagagggaaagcgagtaagcaaggtcagcctttctgcgacgacggcacggtgccaaccgcccacccgaaggcgacggaaagaggggacagacgtggtggttgtagtcgaccttggtagtgtagaatcggcctgtgctctcgccgaagccaagcttgccggcgacactcgcgccgaggaagggcgccgtccagccgccctcggtgatgtactctgggaagtgctttgggatccggaggaagcgcgtgtttttcggctgcgagtcggacgtcgattccgggtcggtcaggatgaacggcatcagatgcgagaggagcgtctgcgggagggctgcggccgaaggttggacgtcagcggatgtcgcttgatgagcagcccaggcgggccatgagtgggcgcactcttgatgcgggcgagctcgccgacgacggcgacgccctcccagacggccagacgctcgtacggcggtagcgtgttgatactcgcccagacggcctcgctgaggcccatgacgcccgacttgccgacgagcgccggctcaaagagcggctcggccgcccgctggcggacaaacgtaatgtcgacagtccggccttcaaactcgaccgagacgacgtcggcctcctcctcgccctcggcaagcgcctttttgcgcgcgtcgtcggccgcccgcttcttggcatcctcctcgcgccgggccgcactcttgtggctctttgccgccttgtcggccatcagcgccttctcgcgcccggcgacgagcgcggccgcaatgtcggtcacaccctcctcctcctgctccttcgggagcgcgaccccgccgaggaggagcggccggagctgattcgtccgccagagcaggcgcgagagccggagcagctgcgagtcggtgtcctgcgcgaggccctccggcggcggagcgaggtcctcgtcgagcgggccggcgagcgtctcgagcacgttctcctggcctcggaggatgccgacgaggtgccgctcgaggtcctctgcgccaagcgggacttcaatcacgcccggcaggtggcacgccgtgtcgataacgggcgaaacggtcgtccgctcgagcccaatgtcgacgacgatgccactgacggcgttcatcgcaaacaggctcgcgaccggccgggcgacgagctgaacagcgggaaagttgagccgctcaaagagcgtctgagcaagccgctgttgctgggcgagtgacagcgtcggcgggtgcgtcaagagcaacggagagtcgttcgacgcccggtgaaacgggccggacgcggcgagcgtgtgcttcctgaagggcggaaggcaaggccagtcagcaaccatccgcgagcgttccatctaccgggcagcgagaagtaccgcaccagagagcctcaatccctcgccagtcggaccaagcgtcaggtccgcggaacggccaggagacctcgaggtcgtccccgcggtccaacgctcggtcgagctctggtccgaccagaacaggcgccgcagccgacttggccttcgccgcggcaggcttgctcgagccgctgactgctaccgacgtcgacgcttccggctgctggccgttcggattgctcgcagtcgcggtgctggtcgaggcagccgacgggtcgacgtccatcgcgttgtcgtcgccagcggcggcagcagcattgctgctttccggctgctcccttcgtcgaccgacgcgagcgacgacctcctgcaaacatccgcagcacaggtgaagtagctggttagtcctgatgtctggcacttggctcggtagggtcagccggacgcacgactgccggaggccggaggagctcgtcgaggccgttgatggcccggacgacatcggccgacgagtcgagcacgacgatcttgtgggcgcgaaagtccattgcgcgctacttgagcggatgcgtcactttgagtggagcgggtcgtcggcggctggcttggtgaggagggtatgggttgcaggaggagtgtcgacgggctgaggcgcgtcgtttacgccgggccgtaactcgctcttacgcaccagctaccccgccccgccgccagccgccgctcctccctcctccaacagctagtccgccgcctcgacagacttcttcagcatgccgcccgaccggccgccgccgccgttcgagcagatgacccggcggatgatccagggccctggcgtgccgacactcaaagaattcgtctcgcgaggtgcgtttcacccgtcataaccggtcgcgcccccgatgctgatcctacctggccctccctccgaccgggtcgcagtcatcagctccaacatctatagtaagtcctctgcctacgaaacgctttcgctcgatccgctcaacgctcatcctttctgcccgcctcatcagccctaaccgatatcggcgacgtgccgttcgcgctcgtcagccgcttcctcgccgacatgccagccgcgcagctcgccaaggtcgagctcaacagtcccgtgcgtttgcttcatcgtctgcgcctccaatcgagcgcagtctagagcggtcatattaagcattgacagagctgatatgttcaaccgactatgagtgctcaggcgatccgacccgagtcgaaaggtgcgcgccagctgcgacatcacccagccccggggaacgcaagcttaccttcgcctcacgttcgctcgtctctccttctcaggcctctggaaggcactggttctacgcgactacttcgaggttcgcatcccatacgagaagggcgacatgcccgagcccaagaattggcgcaaagtctacctcgtgcgtacgccgaggccacctgccggccttagtacctcgttccgccagtctctgacgctcttgctgcgcctttcaatgccttctgctgtctccctttgctgccgtccatctcgccgctctgcagatggcaaccgacgcccgggaggccaaagaggcggccgggcgcgagcggctccgcgccggctacgccgagctcgagaaccgcaaggccgagcgcgggctcgtccacgaccccagcctccgtgagccggtcaagaagggccgctttgggcccgagccaaacgcccggcggccggcggcgagcgtcttcagcaaggcgaggacgcagacaaagtcgtcgctaaatgcgttcaagcatcccgtcagcgcgtcctcggccgctgccagccgggagagaaagccggtcgcgacaccaaagacgcccacctaccgtcccggtccggcaaagacgatcgcgcttcacactcagccgacaaaggatccggcaaaacgcttcaagataggcgaggccggcccctcgagcgcagcacgcaatcggccaagcggctcgcgcgagctcctcgtcccaaaaggcgtctacgtcgcgcctcctctcgagaaggtcgccaaaaccgaaatcgcgcccgtccgggtcgatttctttgcccggccgagccccagccaccttctgctgaaggtcaagcccgcggcggcggcgtctagcagcagggcacccgcacccgcgttccccgacgatctgccactgcctctccctgcgcgggaggctcttccatcggcaccgcgcgccgcgagcgcacccgccgcaagcctcgcttcacgactgtcgtctcgccccctcgccaccgccacatctccttcagcctgctcgcctccagccttgacagagggctcaacgacggccgccagctcgcggccgagcacgcctggcgccctctccccccgactttcatccgctctcgcagccttcgataagtcggccggccgcgcgttctctcccgaagtgaccgccagcccgaaacgacctccttcgcctgctgcacctcgacgctcttcgctccctcctccactgccacccccggcgcagtcgaggtcgggcggagcgtcgtcagcgaccaggccagcgaagcggccgcaaccacaagatggcggcgggctctggatcccgacggccaacaagcgcaagaaggtggcgtcttgagctaagggcgcagcatatctttctgtggcatctcccctcacggtgaccgggtgcattgccgctcgagttgccatccgcaccgggtgtcagcattcagccggcaagcaagtgcagcacttcaacatcgctccccgtgctgcccgacggccgtccgagctcaggcccttgcaacaccgttgccctgccgtcgacctcgcacgcccacgtgctgcgccgcgaaccgcctggttccgtctcggccggccgatcgattaagaagtctcgtacgacggcctcgcccgcctcgcgccgcgctgcgcaacagaccgctggtcttgcggcggcaaagtcgacgagccggtgcggcggaggcgcgcaagttgcatgaggccaagcgagcagggatggctattaccgtgcagggctgcccagaggggcgggcagaccgagactcgcattcatctcgatgtcagtcgaccaggatcttgggtctcgttgttcggtcaaagggcgggcggggagggtgaaggcagcgcactaaattcactgtcggtcatgtggcgccgctgaagtacggccaagcggagcggatgctttcatacgtttctctcccttcttgccgtctgttcggaagccaaccaaggtgctcgctctcggatcaggccggtgttcggaggtcgaagctcgggcggcggcgagcgggcgacgggggagttgctgcgcgaggtcgagcctgcctctccctcacctccgaccatggccatgtcccagactaacgctgcagctgctcaacctgattctgctcttcatcctggtcaggagctcgcgcggttgatgtgagcttgactgacccgtctccggaagcactcggctcgcccagcctccggtacgcttgccaatctgcatatgctcggacgacgcctctcttcggacgacatcccccttcccgccggtcgcttactcggaggtcagccacggccgctcgccatctgatgagaggccaaccattgcccccatgctcccttgcccctgcggcgtccgtcgcttccgaacgagctcacaaatgcctgcccccctctcctcttcgcctcctccccgctctcagctgatctcatctcgccgaacgccacatcgtttttccagcgcgagctgtcagctcgaggaggccaagcagacggacggaaggacgcctcctcctccatgaccgtctttagtgctgatgctggctgacgagccatctcacctgccgccgccgattggccttcctccctcggatgtcgtggatggctctcgcaggcgcctcttccaaacgcctcgtccgagaagtgtccttcacatgcgagcaaggtcgtccatgacggaccggctgccccacgagtcgtttcttcaggctccggactgtcgtcgtcccgtgacagacaatcggctggcaggaccgacgagccgtataaagggagggacggaagggtccttctccaggctgatcatcacgcattctccctgacctctccatcccatcctcacaacccacccaacccaacctcaagcggtcagcatgctggccaccctcttcctctcagctctcgccgcagcttcgacggtcatcgccggcgtcgtgccaaacccaaacccccccgtccctgcattcggcaccgagctcggcctcgactacaagtcccaaggctgctacgccgagctgcccaacggcagtggccgactcttcaggggcgactcgtttgtgagcgtgatgcgacgccttctcgccggcgcggggcggactagcgcgacctgaccgaaacctctgccctcttcaggctgccaacaacatgacgcccaaccggtgcctggactattgccgagacaagggctacccgaccattggtctcgagtacgggcgcgaatgtctgtggtcgatgcggacggctcggcttcccagctgaacaaatggccagggactgaccctgccgttaccccctgtcatccactcaggctactgcagcttccagccggtcccagcgaacgcggccagatcggacaagtgcacaatgagatgcgcaggcagctcgggccagaactgtggcggcccgtctgtgggtccaaacttccttctcgtcccctccttctcgtccccgcctcgctgtgacccgcatccatactgactgtactcgtccctgcaccctccctcccgccacaggctcttctcgtataccagcgcgatacgtcgatggacactcgacccttcaaccccgtccaggttgggaacaagcccgggtggacgaacaacggccgttgcttgcgcgatagtgtccaggcgcgcgtaatggatttccagttcaacgccgacgacatgtcgcaccagaagtgtgttgaccactgtgcaggtcttcaacaagagattgccggcatcgagtagtgagttggggaaggaagccaggtcggaaaagccgctgacgtgtcatcccttcccaacccggggcgcgcagcggcaaagagtacgtccgccctgcacactgaggctcctcttctgccgtcggcatgatctgacctcttcgtctacttgcaagatgcttctgctcgactgtcgccaagctcacggcgaagtactatgcccttcccgtccagaaccgggacgccgtctacttttcgaacgactgcgtccgggcctgccccgggaacggcaaccaactctgcggcgggccagacgctctcacgatcttggagtacactgcgccggcttgagaccactaaccggttcggtccaatggtcatgtcattcatagccatcgggtgcggatgcagcggaagttagtcggctgctccctgaccggcccttccgtaatgtcgcaccaatctttcttccccattccttccttctctccgcgcttctctctctctttctgtacttgtttcactcattgtatccgccatggtctttgaccggtcctctgctcttgcgtctgggaggcgagacctctcaagatcctccctggaacaccggctgtcgactactcagtcaacatcgatacagtgtcctctcgccccagtctgccctcaagcgttgttcttcatctcgcgcagcttctttatggccgcgacggcatcggtcgtgcccgtcgccttgacgacggccggctcggccaatcggacaaagacgttccagcgcttctcgtcgccgatcgtgtagctgttgtggatcgtgtcgcccttgttggcggcggcgacgagcgtctggaggtcggtgttggcgggctcaatcgaggcgccaaacttggccgagccgacggtgtactcgtgcccgttgaggacgaccgtctcatcggggagcttcatctatgatcgggtcgagggaaggccatcagcacacggaggcgagaagtcgtaagcgtacgactggcgcaccagcttctggagtgcggcgtgcatctcggccggcgtgccttcaaagaagcgtccgcagccggcggtgaagagcgtgtcgccggtgaggacgaccttctcgttcgagttcctgtcggtgacgaagaagcagatcgagtcttgtgtgtggcagggcgtgtgaatgcacctgagaaggcgagacggtcagtgccgcgacgagcgaccaaacgcgggggaaggggtacgcactcaacgtcgagtgcctcgccgatcgtgaagcggtcgccgcccttgacctgctttgtcaagcccgggatcgccgacgagccgccgacgcactcgatgcccggaaacgccttgagctgaacagtcgggtcgaagagatgcggggaggtcagcacgtcgacgcgtcatcagtaggccggcgcagcacgaaagcacggacgaaggctcggttgccgccagagtggtcctgcaaggtgtggaacgggcattagcgagagagagtgagagcggcctgtgcatagagctcaacagcgactgacgtcgtggtggtgcgtcgtcaggaggtgcgtgacctgcgaaagaagaggggacgtcgttaagccagtgagctgcagtcgatctcgcgcgcaagagctcgcaccttgacgccctgcttctcgacctcctgctgcacaccggccgcgttgtacgggtcgacgacggcggctgaatttccggccgagtcctggataatgtacatccagttgtcgctacgggctgagaggcagggcgagcgagatggcatgagcgagggtccgagcaggcaagaggcgcaggtcggcggcagcagctcgtcatcagcagctgtctcaagctcggcaagcgcttcgatctggcagagatcgcacccttgactggcgtgaccttcatgcttttgagcttgacgagtgggaggatcgagcggcgggcgagcgaggggagcatgaagttctggggagtcgtggttgcaaggtcggcggcgcaggctcgtcgtcggacgaggccggcaaggcgagagcctgcacttccggctgagcgccatggcgagtactcaggctagcgagtacgtctctggctcaaaatcgagcgagaccggtcgtctgtggctgctgctgctcccgaccaacgaggcgcgctcatcctggccgcgctttccgacagcgagcaactcgcgcccttggtggtgacctgttacaaagcgctcatgctattcgagcgcagacgacgcctttcgagacaaaaccggttcaagcctcctcctcgccgcacgactcgacctgtagaggaaggaaaaggactggcggtcagcgacgttggccggacgacagcaggtacgacaagagagcgacggacaatgatcgagccgcgggtcttgcccgagcccgagccgagcttctcgatggccttgacgaccgacatgccgtcgccgatgacctcgccgaagacctgagaaggaaagggaggtgaggatctgtcagtctggcaagcctctatcggacgcgcgagaaatgtcgtctgcgcacgacgtgggcgccgtcgaggtgaggagtggggacggctgcggatggatgttcagaaaggtcagcctcctccagcctccgcgcgagcgtgggtcaagggcgtgacggactggtgatgaagaactgcgagccgttcgtgttgcgcccggcgttggccatcgagaggagtccgggccgggtgtgcttgacgttgaactgcagtggtcgagcgggtacgatacgtcagggaccagggcgaacaacagaggcgaacttgagtgcggctgtacgttctcgtcggcgaacttctcgccgtagatcgactttccgccggtaccgttgccgcgggtgaagtcgcctgcgggcgaagcgggaagacacgtcagctccgaacagccttgcgctggagattccgcgggctactgaccgccctggagcatgaattgggggatgacacggtggaagggcgatccggcgtaacctgtgcaaaagggagggagcacgcaggcggccgtgggtcagctcggcgactcgcagacggcagctgccaagaggaatgagggcgagcgccggcaaaaagagggacgcaccgaagcccttctcgccggtgcagagcgcgcggaagttggcagcagtcttggggacgacgtcgtcatacctgtaggccgagcgagccggaagagatcgacatcgtcagcccgctggtcggctggccggtcgatcgcctaggacgctaaacttggcaacgcacagcttgaagggaatcttgccaatcggcttgccgtcgacggcgacgttgaagaagacgttgctgaagaggtgcaaggtcgaaggaggtcagcccaagccgatcttttctcgggctgaagaggtggcacgcacgaggccatgcggcgggcggaggggttgaaagccattgtgaacgttaaagctgctcggtcaagtcgtcaataggcggtacctcatcttcccttagcgtcggcacatgactcactgaagatgggagtcggtgcgagaggtacggtcagtcggcgagtgcgtcgaggcgaggctgctgctccgttcctctgggttcccacgcgaggagtgacccgcgcaggccggcggacttcgtcctccttgcaccttgaccttcaactgctcgcccgccactctgctcagcaatgttccgttcgtcgctcgccgctctccgctcgcccgcacgtaaagctgcccagcaggcaccgctccggcaactcgccgtcggctcgctcgttcggtcgttcgccacctcgcggctcgcgcgccagcaggacgagctcgacctctactcgccgttcgagtcgtttggctcgcaggtggctgtccagcgggtgcgtcgagagaggaagggctgttgggcgaattgtcgctgaatatcgctcgtctctcctgcagccggctccttacttcaaaggcgtcgccgccgtcgacggtgcctttgaggacgtcgagctctcacagtacaagggcaaatggctcatcgtcctgttctacccgatggactttacattcgtctgcccgaccgagattctcgcgtttgatcgggccctcccggccttccgcgccctcgacaccgaggtcctcgccgtttcgaccgactcggagttctcgcaccgtgcgtccgcgccgcatcattgcctgccgccacatgcgctgaaatcctctctcatcccttccttcctagtcgcttgggccaacatgccccgcgccgagggcggtctcggcccgaacctcaagctcccgctgctcgccgacaagacgcacaagatgagccgcgactatggcgtcctgctcgaggacaagggcatcgccctccgcggcctgttcgtcatcgacccaaagggcatcacccggcagattacgatcaacgacctgccggtcggccgctcggtcgaggagacgatccggctcgtcaaggccttccaggtgagggcgtggcaaaagaacactctggaggagcatgcgcgcgctgacgttctctcctccttctcttctctcttcctcctctcctctcttccttctctaaagtttactgacgaacacggagaggtgagtaaaatacaatacagacgcgccgatcgacaatgcccgctgacactccctgcctttatcgcctcctccaggtctgcccggctgacgtgagtcgcatcgagcctctctccacacccgtcgcttgctgaccatagcttgacaccctttccctcccagtggtcgcccgagaactctgcgacgattaagccctcgccgaccgagtcgaagtcgtactttgcgcaggcggctgagaaggtcacggaggccctctaggccggcccttcgtattcgaatctcggccccactagatggggatgacgctctgcttgacgactgtgctcttctgccactgtgcgccgcggcagccggcagcgcgctcgttgatcgaagcgagaaagaagccatgagattgagatgaagtgggaccagatgtggaggtgaagggggggcagagcagggcgctcttgcagatacaaaggtgtgtaagaaggcggccgtgcgccgtctaaagggcgaggccgaggaagagagcgccgatcgagagcgcgccgaggcctggcaggctgccctggatggtaaggcccgcgctgcaagcagggaaagaggacgggtcagccaggaaggggcggaaaggggagaaaggaggcagcgccagacgtacgccgagccaggtgtgccagcagcggccgcgcccgtcgttgagttcgaggaggtgccgggcttggcttgggccgtcgacgttgtctggacgatacggccttcgatcgtgtagttgagaggcgtgaaagccttaacgtaagcggcaaacacctcgtcctgcacgccaagggtcggaggagccgcctttggagcgttcgggatgatgccgtcgccacctgagaagtcgcaggaaaaaatgtcagctcgaggaggttgcagcacatgcaggcgccgagggcgacggaccagtggcgataaagtcgagcgtgacgatcgtgtagttggtcgtgggctggacggccgtgccgttgagctcgagcgagatcaggcgggcaccgacggtcgcattcggattccatgtgaactggatctctgcgtaaggcgaggtcgacggggcagtcagcaaagacgtcgagagcgatgcgaggaagacgaaagaacgcacccttggagacctgaatggcagccgacttgtctccagcgctgttgacaccagaggcgacgccctcaaagatgtcccagagctgatcgccggtaaaggtcatctcgacgagttggttgccaaagggagcgagcgcgaggacgtcgccctgcgtaatgtttgggccagtgatggtgctccggaggccgcccgcattgtggattgcgccggcaatcggagcgcccgactgcgaacgggaccagaccctggcggcggcggcgaggaagaagtgcaaagagggagacggtcagcctcgggcgtatagccgcccgtttctggccgagcacgactaacatggcgtcggtcatggcatttccggccgtgcactcgccctcgcggcaggcgttgctaagctcggtgagcgtctcgccaatgacgacgaggctgtatgcgtcaaacggctcgcggtacgaatcgaccatctgctggagctcggcgtcctgcgtgatgttctcgtacatgatgatgggggctgcgagagggatacgactggtcagcgacattgtaagaggagattgatcaaagaaagatgaggcgcgcaccgccggtgtaggaagcgatcttgccagagtccttggcgaacgccacgtcgagccggccgaggtactctccccagcggtacgcggtgacaatgaagacgtcctcgccgtcgaggtccttcacaatcgtcgggtattcgccctggctgtacttggggtcgccgccgagaggggtgtggctgtggccgccgacgaggaggctgacgcgccgcaacgacttggcgagggcgacgtcgttctcaaaaccgatgtgcgtcagcgcaatgacgcgagtcgtcgtgccgttgccgatcgagccgtcgagcaggccgtcaacgaccgattggatgttggtgtagggctcaaaggtcgttccctcgcctggctgggcgatgtcgggagtgtctacagaggtaatcgcgacgatcgagaggttgtgcttgggcatctcgaggaaggggacgagctgcgcggcgagcttcgtgttgttcgtcttgatgctgtgaagaagaggaagacggaggtcagctcgactacgggcagcacgaggcgagtgaacgcaagccgtacttggtcgagatggtcgggaaggtcaggttagcgaggaagtcggcgagaggctcgtcgccagcatcgaactcgtgattactagaagagggcaatcaggcggaaaaggtcaggcgagtcgtcagggaggacggagaaggctcgatacgcacccgagcgtaaaggcgtcgaaattgatcttgttgagcacctcggcgatcttctgtccctcaggctggtagtacgagtagaaaagtctgcggccaggacgtcacgtcagctggcgtcttcaaggcaagagcgtggacgggtactcacgttccctgccactcgtcgccagcgttgaggacgatgacatcgtcgacctcgttcctgatctcgttgatcttggtcaggagccgggcgctgccgccaaagcacgagacgtttttggccacattgtcggccgggcagtcgacgccggtctgagagccgacgaatgagaggtcaggtcagacactgggcgagaggagagggcttcagtgatggcgacgcacgtggcggaacgtgtcgagatgagcatctgaggaaaggcgtaacttgtcacgagtcagtccagcagatcagagtgtcaatcgcgaggcgcgccggcttgacgaacggaggtcgttgacgtggacgatggtgaggttgctagccatgagcagcgtgagagtcagcgtcagcccaatgctgcggactctgaaggaacgcctggcgaacgtactaggtgccatcctcctggaggccgcgcttgactgggcggccgacgggcgtgtagcgcgaggcgagcaagtgatccgttttgccggccttggaggcgacgaccaaagtcgcggccgagaggacgccgagggcgagggaggagagctggagagagagcatgctggcccacgaggtgctgttcgtgggagagtaaggattagcctgagaacagcctgccaccgcgatccgactacgtacaggtggatcggagctgtcgtcgaggatgaggcggaagttaattggagggtcagcgagcggttcggcgttgcccgacggtcggaaggaaggagggccttcgcgagcctcagagctcggagggagcccccgccggacgtacagactgctactggcgaggtccttccttgtccttacaggtcgtggtctgggaagagagaagggtcgacgaccgttctttatcgactcgggcgttcggttcggcgcctttgagagaagggagccttggcagatatccggcaccacgctgctcgacccgacctgttagcctcggccgacgcggctcccccgtgtcggccgggcgagctgcaaaggcgacccgaaagcggccatcacgagagctgctgctgctcttttccccgagaccagttcgcgtctatggtcattggagctcgagcgttgacagaggcttgcattcgcggagccgagagaggtcggcgagctcgcggcgcgcaggcgatcttcctgccctcaccgccgcttcggccagtacgagcacgtgctacgggacagcaacattggttcatcgtctagcagcacgcacgacgcccccggctggcaacgtgaaggaaggccagagcagtcatgccgcagtcgatcaggacaggacgcgctggctacgaggttgtggctttgcggcttgcgcctcggcgagtctggcgcgacgcgcgtccttcggccggcttcggcgaccactgacgagctctgatcgtcctgggaagtgtgcgagatgaaaaaccagctcgcgagcgggagacgtcgtcaggcagtcaggcaaagacgtaccgctccagggccgtcaagggctgagcgaagtgcgacctccacgtttggggcctgtcccccgccaggcgaaggaggagccgcgcagccgggtccgtctcttctggctcatccttgccagtacccggcgggagcgtcatgtcgatcgggcctgggcagccgaagccgtttggcgtcgcctgactaaggcagccgtcgtagagggtcgcgcgaggaaatggccgaagccagcgcttcgacagttagcaggtgagcgggcgagccagagatccagtcggccccatcgcacgtccttgtccagcaagaagaaggatcatggacgcacaaaaagggcgtgggtcatcagctatctacatgagctctctctgagaaggttgccagactttgggccggcgtcccggtctcgtcgcgaagccggggcggctcggccgcgcatacggccctctatgcccgggcgttgacccactcctgccaactgacctcagccttctcgctccggtaccgccggaccgccagcgtcccgcgacccagccgcttaagctcgtctacttcgagctgttcgtcgccttcgcgccagacgtcggcgagcgtgccacggaagccggccttctgcaccgccgactcgagcgtctcttccttcgtccaaccttgctcggaggcaatctgcgggaggtaggttgcgttgagagtgcgctgtgagatagagaaatgaggtgagcgggaggccaggccaggcagagagacgggagcgcagcaggacgctgcgaaagggcgcaccgacgacgacggcggcttgaacgagaggtagacgccgtgcgtgccaatctcccagtcgagtggatgcgcgcaaggctcgaagggcgtcaggattgagacgctgggcgtgcgcagggtcgtcagtgggtcagctcggggcgagatggaagggcggcactctgacacagtgggtgcggcccaacgcacccgcagccgagggtcggaagctcggtcgccttgatcggccggaagcgggtgtcttcaagagcgctgcgagaggagcagtctcggcgtgtcagttcaagcgaccccttctcatctaccaggcgacctcggccaggacgcacgcgacgatggcatactcgcgcagctgctcgccgagctcgcgcggggtgaagttgccgatgcagcctcgcagcctcggctcccggccgggccggagcgtgttccaggtgacaaagacagcatagtcgtcgccggcgttggcgaactggggtgcgggcgaggctgaccgaggggtcgaggcgggcgagagccgggctgagaggacgtcgaagcagaagagggcgtgctcggctgtcgcgatcgactcggccgccgagggcgagggcgaggcaggcatcgttggcgtcggactgagacggcctttctatcaggtagagtgagacgggcgatgggtgatgtcgttgtgggagatggcagggcagaggtcatgggcgggaggaaaggcggcctgctcgatgctgctctcgcccaccgcgtcctccttgcctcgcaaccccatcctcccgtcccgctcgtttgacactctcggatggccgacctagcagcagcagcagacatctttgccgacggcggcgggctcgacgccctcgctatcgctgtcgcccagcagcatcagcatcagcagcagcagtcggcgaccttgagcagctacaacggcgcgccttcggtgcctggcctcgccttcggctcgtccgagctcgcccaatcgcaaggcggaagcagcactactctcggcggcggcaacggtcagaacgtgcgtcgtgtgctggtgctctgagctcgaggcggcgatcagtcaagctgaccaggcttcgaccttctcgtcggtgaccggccaccagctcccgcccctcggtttcgccggcccaggaccggccagcctcccatccggcccgcctcccctcgagccagctaccggaggcgacgacgacgtgccgatcccgcccgagctgctcgagtgggatgacacgctgacgacggccgagcgcgtcaagcttgcccggcgggcggctcacccagacgggccgtcgtcgtcgccgcaggccaagaaggcacccgagccgctcggcaaggcgccggccaaaaagaagaagaagccaaagacgacggtcggcgccgtcgctgctgctaccggcagctcggccaagtcgaagccaaagctggcaccgggcgcagaggcctcggcgagctcggttgcggcggcagcagccgaggtggcgacgacgacggaggctgctacctccgccctgcccgagtcgctcgccaacgccgagcttgcggccgctgcagccgacacgagcagcaagaagggcggtgaccggggcaagttcaagggcctcggccgggcctggcgcaagggcctctcgatctcggtcagtccctgctccctcgtctcgtcgctgctgcacgcgcgcgcgcggctcgacgcgtcgtctcctgcgcaggcgctctcgcggctgactgagcttcactcctttccctcaaccgtctctgcgcatacgacagggcgacaagctcaagacgatgagccgagctgagatcgaggcggctgtccaaggctgggtgccgcctgtactgggtgcgatggacgcggctgcctctgggtcgggcggccagcgcgcagctgtcgacgacgccgctctcgcgcctgcttcctcgagcaagaagccgacatcggccgcatcgtcgttgtcaaaggtccgtttttccagtgtccgctttgacgatcgcccctctgacctgcgatcctgtcctcagcccaaatcgtcgagctcgacctcggcgaagaagggctcggccaagccggcccccgccacggcaggctcgtcatcgacgactatccccgccaaacgcaaggcaaccgcctcatccaaggacgagggcaagaacaagaagagcagcaagtcatctggcaaggtgtggcgcccatcgtcgcctcgttcaatcggcagacccttttgctgacgcaacgtgtggatcaaacccgcagaagacggtcctgtcgaccaacgcctcgctctcgcgcggccgtaactcgtcttcgcccggtgcggcaaacggccgtccacgctcggcgacggccgaccggcacggctcgttctcggtcgagccttcggccgcgcctgtcgccaagggcaaggacgaagacgaggacgaggaagaagaggacgacgccctctactgcctctgccaggaaaagtacgacgaggatcgcatcatgctggcctgcgatatgtgcgtctcgccgcttgcacgccacgcatcccactcgtagcggctgctgacgtctctcctccttttttttcgcaggtgcgagcaatggtaccacccgacttgcgtcggcctgccagaagaccggatcgagctcgtcggccagttcatctgcccgcgctgcgtagagagtgcgccccgagccctgcactaaatgagacgggcacgatgctgacgagatggactcctcgcaatcagtgaccgacgaacgcacgacgtggaagaccaagtgccagacggaaggctgcttcaagtcggccgtcgccggcctgacaaagtgagcgctgcttgtctcttgaagtcaatgtaattgcgtgctgacccgccatcttggcagatattgctcgacgacctgcggcgagactcacctcgtccgcctcctcgagaacgccggcctgcctcggcgacatttcgccgcctcgacggccgacgctcagcctccttccggcgcttgcgtccccaatgccgacttccccggtggcccgcccttcccgctcccggcgccggatgagccccggcggcggctctctgaccggacggccgagctccagcggtcgatcgaggcggtccaggatcaccttggactgctcgccaaacggctgacgctcctctcgcttgcgacccgccgagccgacctcgttcagctcgacagcaatggcacgctcattgtcaccgacaccctcagccaggagactccggcggccgcatcagcggcgtcggctgctttgaccgagccggctcaggcgcccgagccgtacaatcccaagaagaagaagtcgaagtttgacagcgggccggcttcgaatcgggtctgcggcttcgatgagcggctcatcctcggcgaggtcgagtgggctgcctgggtccggagtgccgagggcgtcgcgacggtcggcctgctcgaacaggagctcgagcccgggatgacgctgacgccaacgctcggaggcgagggtgggccgagtccacgggcggttcgcctctacatggccgacagcccagacgaagtctggtgcagcacgtcaagaaagcgctgcgacgctcactctgcgtgcgtgatctctctcgctccacacactgcccttcgcattccgtatactgaaggccaccgattatccctctcctctgcaggtggcacaagatccggcttgacgactttacgctcgagcgaagcgcaaaacgactcgagctcggcgcgctccgcgacagcctgttggccgcccaaaaggagctcgacctcgtcgaccgccgggcgcagaagcggcggcagcagctcgagagtggtccggtcgtcgtcgaggagaaggcggaggaagagccgatggcagtcgacggcaaggcggcgtcagcaactgacgaccaaccgactgcagaggatgtcgcgatggccgacgacgacgctgccgcggcgccggcctccgaggttaaggttgagccgagtgacaccattgagccggccgtcgaggcttcttccggcccgtcattatcggccggtcggccacccccgtcgagtctgccgcctccaccatcagcaccgacggcagtagcggatccggacgctgctccgccggtcgacgggccggccgcccaggacgagcctgacgtcggcggcgacgtcgctatgctcgagccgaccggcgcggccgaggagaagaaggcagctgcgcctgctgtcgacccgccgccgctgccttcaccattaccgtcggccatcgcagcggatgcttcgacgccgacggatccagcaccggacgccgttgccgtcggcgcgacctagggagcaggccggggtcccggagtggtggagatcaggtcaatcttgcagggccgtcgttccgcctgcgttgtagcttgtacgactatgcatttgtccttccgatctgttgttgcaggcgcctcgctctcgctgctgccacaccctgccctgccttactgctgctgctgtatcttctgcgtcgatcatgcttcggtgcctgtttgcgctgcaatttcggttcgcgcattcgcccacggacgggctttccgccgtcgctctcctgctggcctgagctgctcccggccgaggcgggttggaagaggagcagcgaggagcacgagcatcgtcgtcgtccagcctctcaccggctcgacctctgcctcctgccttggcccaccctagaagcaacagcgctgggccagccgtaagagacgtcgaccgccgatccgaaatccacctcgtcgggcttggccttccgatccgctgctcttgtcggcggtcgcccaacctctccccgttgcaccctcgtcctccagagcatggcgccgtcgctgtcgtacccgccccgatcgtcgacctcgtcgagtcaatcccacttctcgatccatagcgatagcggcggcgacgacgacgacgccgacgaggcgagcctctcgctccccctagccagcgcgtcgagccgacgagctcgccggcggccgccgacgctcgctgaacgactcgtcccgccggccctccggcaggccgcctcgcgtcggatcccgcaagcatcgcagcttgtcccgaatcgggcagtcgtttacgcggcagccgtctttaccgtccttgcgcttgcctgtctcgcgctcctgctcgcgccgacgaccggcggcggccgatggccctcagcaggcggagccgacgcgccctcgtcgtcagcaacttcgtcgcctgctcacgccctcctctacgctccggatcgtgcccaggacgtctgcgcctttcttgatccgacgctcggcttctcatcgaccgaacgcatgttgatcgagcgcctgaggccgacgctcgcccgggcaaaggacggcgaaccgcgctggctcgccggccgcaagctcgatctcggcccggccggcaacagcggcgaggaggcgatggaaggcgactaccttggcctgacgatggcagccgagggcgaggcgcacccgctcttcagcctcgtgatccgcggagagcagaagttccggcgaatggtcggccgacagagcgggtcgctcaaggcggccgtcggcgagtacaagcgccgctacggtcgaccgcctcctcgcgggttcgaccgctggtggacctacgtacgtcgatcagcgcctctggatgctgggctttcctgaacgctgacgcgctcgatgtctcaacctccttgggctgtccgacacccatcaggccagcaagcactcggtcctcctgccagacgagtacgactcaatttgggactcgctcgtgcccttcatgggcctcacacacgtcgaattcacccgccgactcgcactggccaaggccgtccgtgggacggtcgtcctcgaggtcaggtcgggcgcggctacggccgtctacaccgatggtctgtcggaggtgcgtcttttgtcggtagtgcgattccggcgtgcttcaaggttccgctggtctggcacatgtggcgggccgcatgcgtacgaccaggggctagaaaggagcctggcgagcgatgaaagctcttgtccggcggaaaggggtcgaaacggcatcggacccaccgcgacaattgcggatccgctgacgcaccgtctgggcgctcttctctctccgtcatctcgcagaacggctactgggagcaccgacggtcggacggccagctcgaactcatcgagcccatcgtcgacgagcttccagatttgtcgtacgtcgactgctcggcctgcctaagcgccagcgtcaacctgccgcccgctgacttgcatgctgccccgccttccacaggatcgtctttggcctgatggacgagccgcaggtcttgctcgactgggagagcagggaagcgctgctggatgctagctttgagcacaagcgtgcgtcgagaccattacgttgctgcgatccttggctgacattttatgttcgggccgcttcagagctctcatcgctaccagcctcgccacctacctctcgaccgctctggacggcttcctgcccaatagactcgccactgcgtcacgcatcaccgccttccggctcgcctcaccgagagttcatctcgccgacatcgcaccggctcgcccagagcccatgcctccacccggagctcaccgaaaggcacggcttcatcgtcggcgagaagggcgtctggacggacccgcagatccgttttgggcccgaagggctcgttcccgtgctggcgatgagcaaagtcgaaggcatggccgacatgggcgggatcccgttcgacaaagtgaggaatctgggctggcggttgggagtaatctggctgctgaccactgcgcctgctgggcagattgacttcgagaaggagcacatcgactcgctcgcctggaaggacaagacgtcggagaagctctactgggtgcgtacctggtttgggcttggccagccctttccgcgctgaccggcccaagcatgtcttgcagcgcggccattcgaccggcggcacgaaggaccgggaccacggtcaccgctggcgccagtctcatcgcctgcgactccatcagatgctcaacgactcgtcgccccgcaagtcgcttccggtcctcgccgtcggcaaaggcggcaaggccgagacgcaatacgttgctccggtcgaccttggcgcttgggcatacgacgtcaggctcgcgggtcaaccgctgcagtgcaactctaccgacggcacctgcgacgagatgaggtgcgagcgaacgaaagctgaggcccttcaggtcgtctactgacagctatgtgtcgccggtcccgtcttgtagcaagatcctcgactttgcgctcgaggacggccaggcggtcgctgatgtgcggcccttcccgaatcttgctttcctggtcgttctgctgaccatgcacccgtcgctctctctcgcgcagaacgccaagtacctctacgacatcgacgtgagcacgcattccgtcggccgggcttgtgtagatgctcctacttatcctctcctcatcacaactaaccgcagggcaacgcctggacgagccgcttccgccggctgatgagcaccaacagccttgtcttgaagagcacaatttgtgcgtcactggcccgtcttttgccccctcgaggctcgcacgctgaccgtcgtccgtagtccccgagtggaacaccgacatcctgcccgagtggttcgcctacgtgccgatgaaggtgcgccgctcctctttctccctcgagatgcagccccccggctgacccagacgattgacactcgtagatcgactacacggacatcgcctccgtcataagcttgtgcgtcgaccgcctgttactcctgctgagcaccactgattcgtccgaccctcgcgcccgcgacgtcgcagctttcgaggttcgcccgggccggccacgggcggcaaaggtgtgcgcgacgaggtcgctcgccgattggcacacaactcgcgatgctgggtccagcgcacatggcgcaaaggtctggcccctcgcctctgtggaaatggctgagtggcgaatctggtgctgacccgtccttcgccccgcagaggacctcgtcgcctaccagtaccggctgctgctcgagtacgcccggatcgagagcggcggcgcctggggcgacctcgacgagtcaatgttgtagatcccttccttccatatcctctacacgcggacctttcctgtcgtctgaagcatgcggtcgacgtgagagccaagggttgcatctatactttcttgcggccggtgtcgacccgccggacgtacggcaggaagccgccaaagctcgggacaaactcgaagcgctcgagtgggctcttaaccgagaggacaaggagcgtcgcggcagtgcacatcaggtaggtgccatagccggtcaggaggtgccaccaggcatgcagctcggtcaccgtgccgagcgtcggcccgaggacggctcggacggcctgaagcgaggagcacgaagcgcgctcggctagccagcagcaaaagccgagaataaaggcaagggcgccgcgctggtagagcgaggcgaccttggtgcgttctcgttcgggcaggcggtgctcgatcaaccaagacgtgcgcgcaacgagggagagcatgatgaagccgaacgcgatttggtgcagagctggcagtgggttgcggatctgaaggcgagtgccacgatgggtcaatatagtgagcgtcttgacttgaaggggaaacgagcgtacataggtgtaggccaaagtcaggtcggccacaaagatggcggcgagcgaggtcatcgagaagaccgagttggcgtagcccggctcgacgttgaagacggaccaggccaggaacgagctgaatccgatcatcggcaactcgtcgcagagctggaagacccacatgagcgtcatgtgaaagaggaagcctgcgagtcgggtcagcgctcttcgcgcgacttgcgaaggagcttgaatgacgacgtactgccggcgccgacgacgagcaggccggcgtacgagaacgagattcggagtgggagaccctcctggatagctcgcgcaatgccgtagaggccgagggccatgaaggggacgttggagaccgtgttgacgaactcagcaatgtagtagctgacgacgtagtcctcctcgcaccactggatggacgccgtaaatggccagcctgcgagggcatagggcaggtcagtctagacgatcgcttataacggcggctagggttcagaggaggaggaagaggaggagcgagagcaccgtcgtcggcaggaggtcggatgaagaccggagctccgacgggcgtcaaaacgaaagagagaggacgacttacgaccctcgccgggtggatactgcagcaccgtcatgatcccgtcgaggccctcggcggaaggcagaaagaacgttcgaggtagggtcgtcggacgacagaaaagttggtgggagctcgaggtcgctgacgttcgagctgggctgaccgggagccgccgccgcacggatccgggagttcgtacaccgaccgcttgagccacgtaggtgcgctctctgtatcacttctctgacaggtcatccttcaagaagagttgacggtggcgagcagtgcgacatgatcatcggcaacacgctcagcccatcatctgcgagacatcgtcgggcgggtactttgtctgcgcgaacgtcatgagcctggacagtcgtcaagcgggcgtcagcaaacaggttgaagtccaaggccgaagaaggagagagacgcaccgcttgacactctgaatgtacttccgactgacttcgtcgttcaaaacgtgcgcgaccgagtctgacgaaatcttctcgcgcgccgaacgggcgtgaatactgcgaggcggcagagtcagtgagtcagcgagaaggaggcgtaccggcccggtcagcgccgacggacccgaccatggtgacaccgatcggccaggcggcgttgccaatcgacaggcggaggtacgagtcgttggcccgctggtactgccggatctgcatgttgtgcatgatctctccgagccggccgaggacatctgcaggcaggttctgcgagggcggcatgggcctttcaggttctgacgcgagagcgttgagcgcagaggaagccgacccactctcgctcgcagcatcttgaacagcggcttcagatattctgccgactggacctggacggcagcagcacgcatgccctgcgatgactgccgaatctcggctaaaggtaaagcaggcgactattagcagctgggcgtcaaacgcagagtctgccctgatagggacacacctggccggtcggccagcgtctgctcccagtccttgagcgtacgctgcagaccgagaaccaacaacggttagcaccgtctggatcgtgtcacaagcgaagcgtcagtaggctgtcaccttgatggcatagtagatcagcgggtagagcttgtctgggtccgtcttgagcaggccgaggtcgatgacgccgcc
